(19) United States
(12) Patent Application Publication
(10) Pub. No.: US 2022/0389115 A1
(43) Pub. Date: Dec. 8, 2022

(54) Methods of Treating Cancer with an Anti-CD39 Antibody

(71) Applicant: Surface Oncology, Inc., Cambridge, MA (US)

(72) Inventors: Andrew Lake, Westwood, MA (US); Alison M. O'NEILL, Cambridge, MA (US); Jou-Ku Chung, Cambridge, MA (US); Robert Ross, Cambridge, MA (US)

(73) Assignee: Surface Oncology, Inc., Cambridge, MA (US)

(21) Appl. No.: 17/829,480

(22) Filed: Jun. 1, 2022

Related U.S. Application Data
(60) Provisional application No. 63/286,291, filed on Dec. 6, 2021.
(60) Provisional application No. 63/252,280, filed on Oct. 5, 2021.
(60) Provisional application No. 63/196,456, filed on Jun. 3, 2021.

(51) Int. Cl. C07K 16/28; A61P 35/00; A61K 39/395; A61K 45/06; A61K 31/7068; A61K 47/64

(52) U.S. Cl. CPC C07K 16/2896; A61P 35/00; A61K 39/3955; A61K 45/06; A61K 31/7068; A61K 47/643; A61K 2039/505

(57) ABSTRACT

The invention provides methods of treating cancer using an anti-CD39 antibody or fragment thereof as monotherapy or in combination with other therapies at particular dosages and frequencies.

### CROSS-REFERENCE TO RELATED APPLICATIONS

[0001] This application claims priority to U.S. Provisional Application No. 63/286,291, filed Dec. 6, 2021, and U.S. Provisional Application No. 63/252,280, filed Oct. 5, 2021, and U.S. Provisional Application No. 63/196,456, filed Jun. 3, 2021, all of which are incorporated by reference in their entireties.

### SEQUENCE LISTING

[0002] This application contains a Sequence Listing in computer readable form entitled “01219-0008-00PCT_ST25”, created May 24, 2022, having a size of 1080000 Bytes, which is incorporated by reference herein.

### FIELD OF THE INVENTION

[0003] Methods of treating cancer with an anti-CD39 antibody at particular dosages are provided as a monotherapy or in combination with additional therapies.

### BACKGROUND

[0004] The immune system acts through suppressive pathways to prevent cancerous cells from growing. Cancers use various mechanisms to subvert immune suppressive pathways in order to avoid recognition and elimination by immune cells, and to allow disease to progress.

[0005] Immunotherapies fight cancer by modifying the patient's immune system by either directly stimulating rejection-type processes or by blocking suppressive pathways.

[0006] Adenosine is an immunomodulatory metabolite within the tumor microenvironment (TME) that interferes with the immune system's anti-tumor responses. In some cancers, extracellular adenosine accumulates and subsequently inhibits the function of immune cells, including T cells, dendritic cells (DC), and natural killer (NK) cells, thereby contributing to anti-tumor immune suppression and supporting tumor growth.

[0007] The ectonucleotidase CD39 hydrolyzes extracellular adenosine triphosphate (ATP) and adenosine diphosphate (ADP) to generate adenosine monophosphate (AMP), which is then converted to adenosine by CD73. Extracellular adenosine binds to adenosine receptors on immune cells, thereby suppressing the immune system. Overexpression of CD39 is associated with poor prognosis in patients with certain types of cancer. Within the TME, the adenosine pathway refers to the extracellular conversion of ATP to adenosine and the signaling of adenosine through the A2A/A2B adenosine receptors on immune cells. Under normal conditions, CD39 works to maintain the balance of extracellular levels of immunosuppressive adenosine and immunostimulatory ATP. In healthy tissues, ATP is barely detectable in the extracellular environment due to rapid breakdown by CD39 and conversion to adenosine by CD73. Under conditions of cellular stress, including cancer, extracellular ATP levels rise significantly leading to high levels of adenosine, which acts to suppress recognition of the tumor by the immune system and the anti-tumor response. While maintained levels of ATP increase T cell proliferation, dendritic cell maturation and pro-inflammatory cytokine levels, the accumulation of adenosine leads to immunosuppression. CD39 inhibition decreases immunosuppressive adenosine while stimulating immune responses by potentiating ATP levels in the TME.

[0008] There continues to be an unmet need for the development of methods of treating cancer. Novel combinations with existing therapies and therapeutic regimens are also needed to more effectively combat various cancers.

[0009] Provided herein are methods for treating cancer comprising administering an anti-CD39 antibody at particular dosages, e.g., administered as a flat (or fixed) dose between 20 and 2000 mg at particular dosing intervals. Pharmaceutical formulations are also provided for use in the disclosed methods. The methods and pharmaceutical formulations disclosed herein provide the benefit of treating various types of cancer, including relapsed or refractory solid tumors, while being well-tolerated, either as a monotherapy or as a combination therapy.

### SUMMARY

[0010] Embodiment A1 is a method of treating cancer in a human subject in need thereof comprising administering a pharmaceutical composition comprising an anti-CD39 antibody or fragment thereof, wherein the antibody is administered at a dose of 1400 mg or 2000 mg.

[0011] Embodiment A2 is the method of embodiment 1, wherein the anti-CD39 antibody or fragment thereof comprises:
[0012] a. HCDR1 comprising the amino acid sequence of SEQ ID NO: 30001;
[0013] b. HCDR2 comprising the amino acid sequence of SEQ ID NO: 30002;
[0014] c. HCDR3 comprising the amino acid sequence of SEQ ID NO: 30003;
[0015] d. LCDR1 comprising the amino acid sequence of SEQ ID NO: 30004;
[0016] e. LCDR2 comprising the amino acid sequence of SEQ ID NO: 30005; and
[0017] f. LCDR3 comprising the amino acid sequence of SEQ ID NO: 30006.

[0018] Embodiment A3 is the method of embodiment 1, wherein the antibody or fragment thereof is administered intravenously.

[0019] Embodiment A4 is the method of embodiment 1 or embodiment 2, wherein the antibody or fragment thereof is administered once every 1, 2, 3, 4, 5 or 6 weeks.

[0020] Embodiment A5 is the method of any one of embodiments 1-3, wherein the antibody or fragment thereof is administered once every 2 weeks.

[0021] Embodiment A6 is the method of any one of the preceding embodiments, wherein the antibody or fragment thereof comprises a heavy chain variable region (VH) and a light chain variable region (VL), wherein the VH is at least 90%, 91%, 92%, 93%, 94%, 95%, 96%, 97%, 98%, 99%, or 100% identical to the amino acid sequence of SEQ ID NO: 30012 and the VL is at least 90%, 91%, 92%, 93%, 94%, 95%, 96%, 97%, 98%, 99%, or 100% identical to the amino acid sequence of SEQ ID NO: 30018.

[0022] Embodiment A7 is the method of any one of the preceding embodiments, wherein the VH comprises the amino acid sequence of SEQ ID NO: 30012 and the VL comprises the amino acid sequence of SEQ ID NO: 30018.

[0023] Embodiment A8 is the method of any one of the preceding embodiments, wherein the antibody or fragment thereof is a full-length antibody.

[0024] Embodiment A9 is the method of any one of the preceding embodiments, wherein the antibody or fragment thereof comprises a fully human immunoglobulin G4 (IgG4) antibody.

[0025] Embodiment A10 is a pharmaceutical composition comprising an anti-CD39 antibody or fragment thereof and a pharmaceutically acceptable carrier, wherein the anti-CD39 antibody or fragment thereof is formulated for administration at a dose of 1400 mg or 2000 mg.

[0026] Embodiment A11 is the pharmaceutical composition of embodiment 10, wherein the anti-CD39 antibody or fragment thereof comprises:
[0027] a. six CDRs comprising:
   [0028] i. HCDR1 comprising the amino acid sequence of SEQ ID NO: 30001;
   [0029] ii. HCDR2 comprising the amino acid sequence of SEQ ID NO: 30002;
   [0030] iii. HCDR3 comprising the amino acid sequence of SEQ ID NO: 30003;
   [0031] iv. LCDR1 comprising the amino acid sequence of SEQ ID NO: 30004;
   [0032] v. LCDR2 comprising the amino acid sequence of SEQ ID NO: 30005; and
   [0033] vi. LCDR3 comprising the amino acid sequence of SEQ ID NO: 30006; and/or
[0034] b. a VH comprising the amino acid sequence of SEQ ID NO: 30012 and a VL comprising the amino acid sequence of SEQ ID NO: 30018.

[0035] Embodiment A12 is the pharmaceutical composition of embodiment 10 or embodiment 11 for use in treating cancer in a human subject in need thereof.

[0036] Embodiment A13 is the pharmaceutical composition for use of embodiment 12, wherein the anti-CD39 antibody or fragment thereof is administered intravenously.

[0037] Embodiment A14 is the pharmaceutical composition for use of embodiment 12 or embodiment 13, wherein the anti-CD39 antibody or fragment thereof is administered once every 1, 2, 3, 4, 5 or 6 weeks.

[0038] Embodiment A15 is the pharmaceutical composition for use of any one of embodiments 12-14, wherein the anti-CD39 antibody or fragment thereof is administered once every two weeks.

[0039] Embodiment A16 is the method or pharmaceutical composition for use of any one of the preceding embodiments, wherein the cancer is newly diagnosed or non-metastatic.

[0040] Embodiment A17 is the method or pharmaceutical composition for use of any one of the preceding embodiments, wherein the cancer is advanced.

[0041] Embodiment A18 is the method or pharmaceutical composition for use of any one of the preceding embodiments, wherein the cancer is refractory.

[0042] Embodiment A19 is the method or pharmaceutical composition for use of any one of the preceding embodiments, wherein the cancer is metastatic.

[0043] Embodiment A20 is the method or pharmaceutical composition for use of any one of the preceding embodiments, wherein the cancer is a solid tumor.

[0044] Embodiment A21 is the method or pharmaceutical composition for use of any one of the preceding embodiments, wherein the cancer is an advanced solid tumor.

[0045] Embodiment A22 is the method or pharmaceutical composition for use of any one of the preceding embodiments, wherein the cancer is a relapsed solid tumor.

[0046] Embodiment A23 is the method or pharmaceutical composition for use of any one of the preceding embodiments, wherein the cancer is a refractory solid tumor.

[0047] Embodiment A24 is the method or pharmaceutical composition for use of any one of the preceding embodiments, wherein the cancer is a metastatic solid tumor.

[0048] Embodiment A25 is the method or pharmaceutical composition for use of any one of the preceding embodiments, wherein the cancer is carcinoma, lymphoma, blastoma, sarcoma, or leukemia.

[0049] Embodiment A26 is the method or pharmaceutical composition for use of any one of the preceding embodiments, wherein the cancer is pancreatic cancer.

[0050] Embodiment A27 is the method or pharmaceutical composition for use of any one of the preceding embodiments, wherein the cancer is gastric cancer.

[0051] Embodiment A28 is the method or pharmaceutical composition for use of any one of the preceding embodiments, wherein the cancer is prostate cancer.

[0052] Embodiment A29 is the method or pharmaceutical composition for use of any one of the preceding embodiments, wherein the cancer is endometrial cancer.

[0053] Embodiment A30 is the method or pharmaceutical composition for use of any one of the preceding embodiments, wherein the cancer is non-small cell lung cancer.

[0054] Embodiment A31 is the method or pharmaceutical composition for use of any one of the preceding embodiments, wherein the cancer is colorectal cancer.

[0055] Embodiment A32 is the method or pharmaceutical composition for use of any one of the preceding embodiments, wherein the cancer is ovarian cancer.

[0056] Embodiment A33 is the method or pharmaceutical composition for use of any one of the preceding embodiments, wherein the cancer is squamous cell cancer, small-cell lung cancer, pituitary cancer, esophageal cancer, astrocytoma, soft tissue sarcoma, non-small cell lung cancer (including squamous cell non-small cell lung cancer), adenocarcinoma of the lung, squamous carcinoma of the lung, cancer of the peritoneum, hepatocellular cancer, gastrointestinal cancer, pancreatic cancer, glioblastoma, cervical cancer, ovarian cancer, liver cancer, bladder cancer, hepatoma, breast cancer, colon cancer, colorectal cancer, endometrial or uterine carcinoma, salivary gland carcinoma, kidney cancer, renal cell carcinoma, liver cancer, prostate cancer, vulval cancer, thyroid cancer, hepatic carcinoma, brain cancer, endometrial cancer, testis cancer, cholangiocarcinoma, gallbladder carcinoma, gastric cancer, melanoma, or various types of head and neck cancer (including squamous cell carcinoma of the head and neck).

[0057] Embodiment A34 is the method or pharmaceutical composition for use of any one of the preceding embodiments, wherein the method or use further comprises administering a second therapy.

[0058] Embodiment A35 is the method or pharmaceutical composition for use of embodiment 34, wherein the second therapy is a chemotherapeutic agent.

[0059] Embodiment A36 is the method or pharmaceutical composition for use of embodiment 34 or embodiment 35, wherein the second therapy is gemcitabine.

[0060] Embodiment A37 is the method or pharmaceutical composition for use of embodiment 34 or embodiment 35, wherein the second therapy is albumin-bound paclitaxel.

[0061] Embodiment A38 is the method or pharmaceutical composition for use of embodiment 34 or embodiment 35, wherein the second therapy is an antagonist of PD-1 or PD-L1.

[0062] Embodiment A39 is the method or pharmaceutical composition for use of embodiment 34, wherein the second therapy is an anti-PD-1 or anti-PD-L1 antibody.

[0063] Embodiment A40 is the method or pharmaceutical composition for use of any one of embodiments 1-9 or 12-33, wherein the method or use further comprises administering two additional therapies.

[0064] Embodiment A41 is the method or pharmaceutical composition for use of embodiment 40, wherein the two additional therapies comprise a chemotherapeutic agent and an antagonist of PD-1 or an antagonist of PD-L1.

[0065] Embodiment A42 is the method or pharmaceutical composition for use of embodiment 40, wherein the two additional therapies comprise a chemotherapeutic agent and an agent targeting the adenosine axis.

[0066] Embodiment A43 is the method or pharmaceutical composition for use of embodiment 40, wherein the two additional therapies comprise an antagonist of PD-1 or an antagonist of PD-L1 and an agent targeting the adenosine axis.

[0067] Embodiment A44 is the method or pharmaceutical composition for use of embodiment 40, wherein one of the two additional therapies comprise an A2AR antagonist, an A2BR antagonist, or a dual A2AR/A2B antagonist.

[0068] Embodiment A45 is the method or pharmaceutical composition for use of embodiment 40, wherein the two additional therapies comprise at least one chemotherapeutic agent.

[0069] Embodiment A46 is the method or pharmaceutical composition for use of embodiment 40, wherein the two additional therapies comprise two chemotherapeutic agents.

[0070] Embodiment A47 is the method or pharmaceutical composition for use of embodiment 45 or embodiment 46, wherein one of the two additional therapies is gemcitabine.

[0071] Embodiment A48 is the method or pharmaceutical composition for use of embodiment 45 or embodiment 46, wherein one of the two additional therapies is albumin-bound paclitaxel.

[0072] Embodiment A49 is the method or pharmaceutical composition for use of any one of embodiments 40, or 45-48, wherein the two additional therapies comprise gemcitabine and albumin-bound paclitaxel.

[0073] Embodiment A50 is the method or pharmaceutical composition for use of any one of embodiments 37, or 48-49, wherein albumin-bound paclitaxel is administered at a dose of 125 mg/m² on days 1, 8, and 15 of a 28-day cycle.

[0074] Embodiment A51 is the method or pharmaceutical composition for use of any one of embodiments 37, or 48-50, wherein albumin-bound paclitaxel is administered to the subject by intravenous administration.

[0075] Embodiment A52 is the method or pharmaceutical composition for use of any one of embodiments 36, 47, or 49, wherein gemcitabine is administered at a dose of 1000 mg/m² on days 1, 8, and 15 of a 28-day cycle.

[0076] Embodiment A53 is the method or pharmaceutical composition for use of any one of embodiments 36, 47, 49, or 52, wherein gemcitabine is administered to the subject by intravenous administration.

[0077] Embodiment A54 is the method or pharmaceutical composition for use of any one of embodiments 49-53, wherein the anti-CD39 antibody, albumin-bound paclitaxel, and gemcitabine are administered sequentially.

[0078] Embodiment A55 is the method or pharmaceutical composition for use of embodiment 54, wherein the anti-CD39 antibody is administered before albumin-bound paclitaxel and gemcitabine are administered.

[0079] Embodiment A56 is a method of treating cancer in a human subject in need thereof comprising administering an anti-CD39 antibody comprising a VH comprising the amino acid sequence of SEQ ID NO: 30012 and a VL comprising the amino acid sequence of SEQ ID NO: 30018, wherein the antibody is administered at a dose of 1400 mg intravenously every 2 weeks.

[0080] Embodiment A57 is a method of treating cancer in a human subject in need thereof comprising administering an anti-CD39 antibody comprising a VH comprising the amino acid sequence of SEQ ID NO: 30012 and a VL comprising the amino acid sequence of SEQ ID NO: 30018, wherein the antibody is administered at a dose of 2000 mg intravenously every 2 weeks.

[0081] Embodiment A58 is a method of treating cancer in a human subject in need thereof comprising administering an anti-CD39 antibody comprising a VH comprising the amino acid sequence of SEQ ID NO: 30012 and a VL comprising the amino acid sequence of SEQ ID NO: 30018, wherein the antibody is administered at a dose of 1400 mg intravenously every 2 weeks, and further administering one or two chemotherapeutic agents.

[0082] Embodiment A59 is a method of treating cancer in a human subject in need thereof comprising administering an anti-CD39 antibody comprising a VH comprising the amino acid sequence of SEQ ID NO: 30012 and a VL comprising the amino acid sequence of SEQ ID NO: 30018, wherein the antibody is administered at a dose of 2000 mg intravenously every 2 weeks, and further administering one or two chemotherapeutic agents.

[0083] Embodiment A60 is a method of treating cancer in a human subject in need thereof comprising administering an anti-CD39 antibody comprising a VH comprising the amino acid sequence of SEQ ID NO: 30012 and a VL comprising the amino acid sequence of SEQ ID NO: 30018, wherein the antibody is administered at a dose of 1400 mg intravenously every 2 weeks, and further administering gemcitabine and albumin-bound paclitaxel.

[0084] Embodiment A61 is a method of treating cancer in a human subject in need thereof comprising administering an anti-CD39 antibody comprising a VH comprising the amino acid sequence of SEQ ID NO: 30012 and a VL comprising the amino acid sequence of SEQ ID NO: 30018, wherein the antibody is administered at a dose of 2000 mg intravenously every 2 weeks, and further administering gemcitabine and albumin-bound paclitaxel.

### BRIEF DESCRIPTION OF THE FIGURES

[0085] FIG. 1 is a schematic of a phase 1 dose-escalation study for an anti-CD39 antibody.

[0086] FIG. 2 is a swimmer plot showing individual patients' time on the study in weeks (x-axis), grouped by starting dose and their corresponding tumor type (y-axis), with the arrows indicating patients continuing therapy at the time of the data snapshot with circles denoting determination of progressive disease by RECIST criteria. Diamonds left of the (y-axis) indicate prior α-PD-(L)1 therapy. Intra-patient dose escalation was permitted, and two (2) patients were able to escalate to higher dose levels.

[0087] FIG. 3 is a waterfall plot illustrating the best percentage change in target lesions from baseline; seven (7) of nineteen (19) or 37% of patients stable disease at 8 weeks with four (4) patients or 21% persisting beyond sixteen (16) weeks.

[0088] FIG. 4 is a graphical representation of the pharmacokinetics as measured by serum concentrations after a single dose of anti-CD39 antibody administered at 20, 70, 200, 700, and 1400 mg. The anti-CD39 antibody has linear and dose-proportional pharmacokinetics.

[0089] FIG. 5 is a graphical representation of the primary pharmacodynamic marker utilized in the study subsequent to the administration of anti-CD39 antibody at doses of 20, 70, 200, 700, and 1400 mg, as measured by percent target occupancy on peripheral blood monocytes (PBMCs). The figure presents % target occupancy on the Y axis, sample timepoint on the X axis (over multiple cycles), with colors indicating different dose levels. Maximal % target occupancy was achieved at 6 hours post-dosing in patients dosed at 70 mg and above. Target Occupancy was maintained near saturation, even at trough, at doses of 200 mg and above.

[0090] FIGS. 6A-6F are baseline and week 8 images from a 60 year old man with pancreatic cancer with extensive liver metastases who received clone 22 plus gemcitabine and albumin-bound paclitaxel after progression on FOLFIRINOX chemotherapy regimen. The baseline images (FIGS. 6A, 6C and 6E) are in the top row with corresponding week 8 images (FIGS. 6B, 6D and 6F) in the bottom row, with arrows marking lesions followed for RECIST response.

[0091] FIG. 7 is a swimmer plot showing 39 individual patients' time in the monotherapy dose escalation and monotherapy tumor biopsy expansion study in weeks (x-axis), grouped by starting dose and their corresponding tumor type (y-axis), with the arrows indicating patients continuing therapy at the time of the data snapshot with circles denoting determination of progressive disease by RECIST criteria. Diamonds left of the (y-axis) indicate prior α-PD-(L)1 therapy. Intra-patient dose escalation was permitted, and two (2) patients were able to escalate to higher dose levels. From the top, rows 1-8 and 14-19 are patients who received 1400 mg doses. Rows 9-13, 20-25 are patients who received 700 mg doses. Rows 26-33 are patients who received 200 mg doses. Row 34 is a patient who received 70 mg doses from week 0 to week 16 and received 200 mg doses thereafter. Rows 35 and 36 are patients who received 70 mg doses. Row 37 is a patient who received 20 mg doses from week 0 to week 24, 70 mg doses from week 24 to week 36, and 200 mg doses from week 36 until just before week 44. Rows 38 and 39 are patients who received 20 mg doses of clone 22.

[0092] FIGS. 8A-8B are graphical summaries of the monotherapy response utilizing the Investigator Assessment per RECIST v1.1. FIG. 8A shows target lesion change over time (n=32). FIG. 8B is a waterfall plot illustrating the best percentage change in target lesions from baseline. From the left, bars 1-2, 4-5, 7-8, 10-12, and 23 are patients who received 700 mg doses. Bars 3, 13-16, 18-19, 21, 26, and 31 are patients who received 1400 mg doses. Bars 6, 9, 20, 22, 24, 25 are patients who received 200 mg doses. Bars 17, 27-28 are patients who received 70 mg doses. Bars 30 and 32 are patients who received 20 mg doses.

[0093] FIG. 9 is a swimmer plot showing 10 individual patients' time in the clone 22 and gemcitabine/albumin-bound paclitaxel combination dose escalation study in weeks (x-axis), grouped by starting dose and their corresponding tumor type (y-axis), with the arrows indicating patients continuing therapy at the time of the data snapshot with circles denoting determination of progressive disease by RECIST criteria. Diamonds left of the (y-axis) indicate no lines of prior therapy. From the top, row 1 is a patient who received a 1400 mg dose of clone 22. Rows 2-4 are patients who received 700 mg doses of clone 22. Rows 5-10 are patients who received 200 mg doses of clone 22.

[0094] FIGS. 10A-10B are graphical summaries of the combination therapy of clone 22 with gemcitabine and albumin-bound paclitaxel utilizing the Investigator Assessment per RECIST v1.1. FIG. 10B is a waterfall plot illustrating the best percentage change in target lesions from baseline. For FIG. 10A, from top to bottom, the first 5 lines are patients who received 200 mg doses of clone 22, line 5 received 700 mg of clone 22, and line 6 received 200 mg clone 22. For FIG. 10B, from the left, bars 1-5 and 7 are patients who received 200 mg doses of clone 22. Bar 6 is a patient who received 700 mg doses of clone 22.

[0095] FIG. 11 shows dose dependent loss of CD39 from circulating B cells, with sustained, complete loss starting at 700 mg.

### DETAILED DESCRIPTION OF EMBODIMENTS OF THE INVENTION

### I. Definitions

[0096] In this application, the use of “or” means “and/or” unless stated otherwise. In the context of a multiple dependent claim, the use of “or” refers back to more than one preceding independent or dependent claim in the alternative only. The terms “comprising,” “including,” and “having” can be used interchangeably herein.

[0097] The term “CD39” refers to the ectonucleoside triphosphate diphospholydrolase 1 polypeptide encoded in humans by the ENTPD1 gene. Other names for CD39 include ENTPD1, E-NTPDase1, cluster of differentiation 39, ATPDase, NTPDase-1, and SPG64.

[0098] CD39 catalyzes the hydrolysis of γ- and β-phosphate residues of extracellular nucleoside triphosphates (NTPs; e.g., adenosine triphosphate or ATP) and nucleoside diphosphates (NDPs; e.g., adenosine diphosphate or ADP), converting these molecules to the nucleoside monophosphate (NMP; e.g., adenosine monophosphate or AMP) derivative. An exemplary amino acid sequence of CD39 is at NCBI Reference Sequence: NP_001767.3.

[0099] The term “antibody” herein is used in the broadest sense and encompasses various antibody structures, including but not limited to monoclonal antibodies, polyclonal antibodies, multispecific antibodies (e.g., bispecific antibodies), and antibody fragments so long as they exhibit the desired antigen-binding activity.

[0100] An “antibody fragment” refers to a molecule other than an intact antibody that comprises a portion of an intact antibody that binds the antigen to which the intact antibody binds. Examples of antibody fragments include but are not limited to Fd, Fv, Fab, Fab′, Fab′-SH, F(ab′)2; diabodies; linear antibodies; single-chain antibody molecules (e.g. scFv); and multispecific antibodies formed from antibody fragments.

[0101] The term “cancer” is used herein to refer to a group of cells that exhibit abnormally high levels of proliferation and growth. A cancer may be benign (also referred to as a benign tumor), pre-malignant, or malignant. Cancer cells may be solid cancer cells or leukemic cancer cells. The term “tumor” is used herein to refer to a cell or cells that comprise a cancer. The term “tumor growth” is used herein to refer to proliferation or growth by a cell or cells that comprise a cancer that leads to a corresponding increase in the size or extent of the cancer.

[0102] The “class” of an antibody refers to the type of constant domain or constant region possessed by its heavy chain. There are five major classes of antibodies: IgA, IgD, IgE, IgG, and IgM, and several of these may be further divided into subclasses (isotypes), e.g., IgG1, IgG2, IgG3, IgG4, IgA1, and IgA2. The heavy chain constant domains that correspond to the different classes of immunoglobulins are called α, δ, ε, γ, and μ, respectively.

[0103] Administration “in combination with” one or more further therapeutic agents includes simultaneous (concurrent) and consecutive (sequential) administration in any order.

[0104] The term “cytotoxic agent” as used herein refers to a substance that inhibits or prevents a cellular function and/or causes cell death or destruction. Cytotoxic agents include, but are not limited to, radioactive isotopes (e.g., At211, I131, I125, Y90, Re186, Re188, Sm153, Bi212, P32, Pb212 and radioactive isotopes of Lu); chemotherapeutic agents or drugs (e.g., methotrexate, adriamicin, vinca alkaloids (vincristine, vinblastine, etoposide), doxorubicin, melphalan, mitomycin C, chlorambucil, daunorubicin or other intercalating agents); growth inhibitory agents; enzymes and fragments thereof such as nucleolytic enzymes; antibiotics; toxins such as small molecule toxins or enzymatically active toxins of bacterial, fungal, plant or animal origin, including fragments and/or variants thereof; and the various antitumor or anticancer agents disclosed below.

[0105] A “dosage” refers to the amount and period of time of an administration. A “dose” refers to the amount administered. A “dosing interval” refers to the period of time between doses.

[0106] The term “Fc region” herein is used to define a C-terminal region of an immunoglobulin heavy chain that contains at least a portion of the constant region. The term includes native sequence Fc regions and variant Fc regions. In some embodiments, a human IgG heavy chain Fc region extends from Cys226, or from Pro230, to the carboxyl-terminus of the heavy chain. However, the C-terminal lysine (Lys447) of the Fc region may or may not be present (numbering in this paragraph is according to the EU numbering system, also called the EU index, as described in Kabat et al., Sequences of Proteins of Immunological Interest, 5^{th} Ed. Public Health Service, National Institutes of Health, Bethesda, Md., 1991).

[0107] “Framework,” “framework region,” or “FR” refers to variable domain residues other than hypervariable region (HVR) residues. The FR of a variable domain generally consists of four FR domains: FR1, FR2, FR3, and FR4. Accordingly, the HVR and FR sequences generally appear in the following sequence in VH (or VL): FR1-H1(L1)-FR2-H2(L2)-FR3-H3(L3)-FR4.

[0108] The terms “full length antibody,” “intact antibody,” and “whole antibody” are used herein interchangeably to refer to an antibody having a structure substantially similar to a native antibody structure or having heavy chains that contain an Fc region as defined herein.

[0109] A “human antibody” is one which possesses an amino acid sequence which corresponds to that of an antibody produced by a human or a human cell or derived from a non-human source that utilizes human antibody repertoires or other human antibody-encoding sequences. This definition of a human antibody specifically excludes a humanized antibody comprising non-human antigen-binding residues.

[0110] The term “variable region” or “variable domain” refers to the domain of an antibody heavy or light chain that is involved in binding the antibody to antigen. The variable domains of the heavy chain and light chain (VH and VL, respectively) of a native antibody generally have similar structures, with each domain comprising four conserved framework regions (FRs) and three hypervariable regions (HVRs). (See, e.g., Kindt et al. Kuby Immunology, 6^{th} ed., W.H. Freeman and Co., page 91 (2007).) A single VH or VL domain may be sufficient to confer antigen-binding specificity. Furthermore, antibodies that bind a particular antigen may be isolated using a VH or VL domain from an antibody that binds the antigen to screen a library of complementary VL or VH domains, respectively. See, e.g., Portolano et al., J. Immunol. 150:880-887 (1993); Clarkson et al., Nature 352:624-628 (1991).

[0111] A “human consensus framework” is a framework which represents the most commonly occurring amino acid residues in a selection of human immunoglobulin VL or VH framework sequences. Generally, the selection of human immunoglobulin VL or VH sequences is from a subgroup of variable domain sequences. Generally, the subgroup of sequences is a subgroup as in Kabat et al., Sequences of Proteins of Immunological Interest, Fifth Edition, NIH Publication 91-3242, Bethesda Md. (1991), vols. 1-3. In some embodiments, for the VL, the subgroup is subgroup kappa I as in Kabat et al., supra. In some embodiments, for the VH, the subgroup is subgroup III as in Kabat et al., supra.

[0112] The term “hypervariable region” or “HVR” as used herein refers to each of the regions of an antibody variable domain which are hypervariable in sequence (“complementarity determining regions” or “CDRs”) and/or form structurally defined loops (“hypervariable loops”) and/or contain the antigen-contacting residues (“antigen contacts”). Generally, antibodies comprise six HVRs: three in the VH (H1, H2, H3), and three in the VL (L1, L2, L3).

[0113] An “individual” or “subject” is a mammal. Mammals include, but are not limited to, domesticated animals (e.g., cows, sheep, cats, dogs, and horses), primates (e.g., humans and non-human primates such as monkeys), rabbits, and rodents (e.g., mice and rats). In certain embodiments, the individual or subject is a human. In some embodiments, the human subject is referred to as a “patient.”

[0114] An increase in “interferon gamma response” or “IFNγ response” or “IFN-γ response” refers to any increase in activity associated with the cytokine IFNγ, and includes, e.g., an increase in IFNγ protein (e.g., present in the TME, secreted from a cell, or detected intracellularly), an increase in IFNγ gene expression in a cell (e.g., by measuring mRNA levels), an increase in gene expression of genes related to IFNγ (e.g., by measuring mRNA levels) (e.g., genes related to IFNγ include, e.g., Ccl8, Apoe, C1qa, C1qb, C1qc, Arg1, Lgmn, Ms4a7, Lyz2, Ccl7, Cd3g, Cxcr6, etc.). The increase may be detected in a sample from an individual after administration of a therapy e.g., as compared to a sample from an untreated individual. In some embodiments, increase may be detected in a sample from an individual after administration of a first and a second therapy e.g., as compared to a sample from an individual after administration of only the first or the second therapy.

[0115] An “isolated” antibody is one which has been separated from a component of its natural environment. In some embodiments, an antibody is purified to greater than 95% or 99% purity as determined by, for example, electrophoretic (e.g., SDS-PAGE, isoelectric focusing (IEF), capillary electrophoresis) or chromatographic (e.g., ion exchange or reverse phase HPLC). For review of methods for assessment of antibody purity, see, e.g., Flatman et al., J. Chromatogr. B 848:79-87 (2007).

[0116] The term “albumin-bound paclitaxel” is also known in the art as “nab-paclitaxel” and “Abraxane” and is paclitaxel protein-bound particles for injectable suspension (albumin-bound), formulated as albumin-bound nanoparticles.

[0117] The term “monoclonal antibody” as used herein refers to an antibody obtained from a population of substantially homogeneous antibodies, i.e., the individual antibodies comprising the population are identical and/or bind the same epitope, except for possible variant antibodies, e.g., containing naturally occurring mutations or arising during production of a monoclonal antibody preparation, such variants generally being present in minor amounts.

[0118] In contrast to polyclonal antibody preparations, which typically include different antibodies directed against different determinants (epitopes), each monoclonal antibody of a monoclonal antibody preparation is directed against a single determinant on an antigen. Thus, the modifier “monoclonal” indicates the character of the antibody as being obtained from a substantially homogeneous population of antibodies and is not to be construed as requiring production of the antibody by any particular method. For example, the monoclonal antibodies to be used in accordance with the present invention may be made by a variety of techniques, including but not limited to the hybridoma method, recombinant DNA methods, phage-display methods, and methods utilizing transgenic animals containing all or part of the human immunoglobulin loci, such methods and other exemplary methods for making monoclonal antibodies being described herein.

[0119] “Percent (%) amino acid sequence identity” with respect to a reference polypeptide sequence is defined as the percentage of amino acid residues in a candidate sequence that are identical with the amino acid residues in the reference polypeptide sequence, after aligning the sequences and introducing gaps, if necessary, to achieve the maximum percent sequence identity, and not considering any conservative substitutions as part of the sequence identity. Alignment for purposes of determining percent amino acid sequence identity can be achieved in various ways that are within the skill in the art, for instance, using publicly available computer software such as BLAST, BLAST-2, ALIGN or Megalign (DNASTAR) software. Those skilled in the art can determine appropriate parameters for aligning sequences, including any algorithms needed to achieve maximal alignment over the full length of the sequences being compared. For purposes herein, however, % amino acid sequence identity values are generated using the sequence comparison computer program ALIGN-2. The ALIGN-2 sequence comparison computer program was authored by Genentech, Inc., and the source code has been filed with user documentation in the U.S. Copyright Office, Wash. D.C., 20559, where it is registered under U.S. Copyright Registration No. TXU510087. The ALIGN-2 program is publicly available from Genentech, Inc., South San Francisco, Calif., or may be compiled from the source code. The ALIGN-2 program should be compiled for use on a UNIX operating system, including digital UNIX V4.0D. All sequence comparison parameters are set by the ALIGN-2 program and do not vary. In situations where ALIGN-2 is employed for amino acid sequence comparisons, the % amino acid sequence identity of a given amino acid sequence A to, with, or against a given amino acid sequence B (which can alternatively be phrased as a given amino acid sequence A that has or comprises a certain % amino acid sequence identity to, with, or against a given amino acid sequence B) is calculated as follows:

100 times the fraction X/Y

where X is the number of amino acid residues scored as identical matches by the sequence alignment program ALIGN-2 in that program's alignment of A and B, and where Y is the total number of amino acid residues in B. It will be appreciated that where the length of amino acid sequence A is not equal to the length of amino acid sequence B, the % amino acid sequence identity of A to B will not equal the % amino acid sequence identity of B to A. Unless specifically stated otherwise, all % amino acid sequence identity values used herein are obtained as described in the immediately preceding paragraph using the ALIGN-2 computer program.

[0120] The term “pharmaceutical formulation” or “pharmaceutical composition” or “pharmaceutically acceptable composition” refers to a preparation which is in such form as to permit the biological activity of an active ingredient contained therein to be effective, and which contains no additional components which are unacceptably toxic to a subject to which the formulation would be administered.

[0121] A “pharmaceutically acceptable carrier” refers to an ingredient in a pharmaceutical formulation or composition, other than an active ingredient, which is nontoxic to a subject. A pharmaceutically acceptable carrier includes, but is not limited to, a buffer, excipient, stabilizer, and/or preservative.

[0122] The term “refractory,” as used herein, refers to a cancer that has not responded to a prior treatment. Refractory cancer includes a cancer that has exhibited an inadequate response to, or progressed on, a prior treatment, e.g., a prior treatment with an immuno-oncology or immunotherapy drug, e.g., with a blocking CTLA-4 or PD-1 antibody. In some embodiments, the cancer is refractory or resistant to a prior treatment, either intrinsically refractory or resistant (e.g., refractory to a PD-1 pathway antagonist), or a resistance or refractory state is acquired. The term “relapsed,” as used herein refers to a reoccurrence of a cancer in a subject. The term “metastatic,” as used herein refers to a cancer cell that has changed position from the place where it started, for example, the spread of a cancer from a primary site to another place in the body. The term “advanced,” as used herein refers to cancer that is unlikely to be cured or controlled with treatment.

[0123] As used herein, “treatment” (and grammatical variations thereof such as “treat” or “treating”) refers to clinical intervention in an attempt to alter the natural course of the individual being treated and can be performed either for prophylaxis or during the course of clinical pathology. Desirable effects of treatment include, but are not limited to, preventing occurrence or recurrence of disease, alleviation of symptoms, diminishment of any direct or indirect pathological consequences of the disease, preventing metastasis, decreasing the rate of disease progression, amelioration or palliation of the disease state, and remission or improved prognosis. In some embodiments, disclosed antibodies are used to delay development of a disease or to slow the progression of a disease.

[0124] As used herein, “about” or “approximately” means an acceptable error for a particular value as determined by one of ordinary skill in the art, which depends in part on how the value is measured or determined.

[0125] As used herein, numeric ranges (e.g., 1-2000) are inclusive of the numbers defining the range. Also as used herein, measured and measurable values are understood to be approximate, taking into account significant digits and the error associated with the measurement.

### II. Methods of Treating

[0126] Methods of treating cancer comprising administering an anti-CD39 antibody at particular dosages are provided. The dosages provided herein comprise a dose and a dosing interval for administration of the anti-CD39 antibody. In some embodiments, the doses are administered intravenously. It is understood that the disclosed doses include amounts that are approximately the amount of the disclosed doses.

[0127] The doses disclosed herein may be administered as a “flat” dose (or “fixed” dose) that does not depend on the weight of the subject.

[0128] In some embodiments, methods are provided for treating cancer in a human subject in need thereof comprising administering an anti-CD39 antibody, wherein the antibody is administered at a fixed or flat dose. In some embodiments, methods are provided for treating cancer in a human subject in need thereof comprising administering an anti-CD39 antibody, wherein the antibody is administered at a dose of 20, 70, 200, 700, 1400, or 2000 mg.

[0129] In some embodiments, methods are provided for treating cancer in a human subject in need thereof comprising administering an anti-CD39 antibody comprising:
[0130] a) HCDR1 comprising the amino acid sequence of SEQ ID NO: 30001;
[0131] b) HCDR2 comprising the amino acid sequence of SEQ ID NO: 30002;
[0132] c) HCDR3 comprising the amino acid sequence of SEQ ID NO: 30003;
[0133] d) LCDR1 comprising the amino acid sequence of SEQ ID NO: 30004;
[0134] e) LCDR2 comprising the amino acid sequence of SEQ ID NO: 30005; and
[0135] f) LCDR3 comprising the amino acid sequence of SEQ ID NO: 30006;
[0136] wherein the antibody is administered at a fixed or flat dose.

[0137] In some embodiments, methods are provided for treating cancer in a human subject in need thereof comprising administering an anti-CD39 antibody comprising:
[0138] a) HCDR1 comprising the amino acid sequence of SEQ ID NO: 30001;
[0139] b) HCDR2 comprising the amino acid sequence of SEQ ID NO: 30002;
[0140] c) HCDR3 comprising the amino acid sequence of SEQ ID NO: 30003;
[0141] d) LCDR1 comprising the amino acid sequence of SEQ ID NO: 30004;
[0142] e) LCDR2 comprising the amino acid sequence of SEQ ID NO: 30005; and
[0143] f) LCDR3 comprising the amino acid sequence of SEQ ID NO: 30006;
   wherein the antibody is administered at a dose of 20, 70, 200, 700, 1400, or 2000 mg.

[0144] In some embodiments, methods are provided for treating cancer in a human subject in need thereof comprising administering an anti-CD39 antibody comprising:
[0145] a) HCDR1 comprising the amino acid sequence of SEQ ID NO: 30001;
[0146] b) HCDR2 comprising the amino acid sequence of SEQ ID NO: 30002;
[0147] c) HCDR3 comprising the amino acid sequence of SEQ ID NO: 30003;
[0148] d) LCDR1 comprising the amino acid sequence of SEQ ID NO: 30004;
[0149] e) LCDR2 comprising the amino acid sequence of SEQ ID NO: 30005; and
[0150] f) LCDR3 comprising the amino acid sequence of SEQ ID NO: 30006;
   wherein the antibody is administered at a dose of 20, 70, 200, 700, 1400, or 2000 mg intravenously.

[0151] In some embodiments, methods are provided for treating cancer in a human subject in need thereof comprising administering an anti-CD39 antibody disclosed herein, wherein the antibody is administered at a dose between 20-2000 mg, 70-2000 mg, 200-2000 mg, 700-2000 mg, or 1400-2000 mg. In some embodiments, the dose is administered as a dosage once every 1, 2, 3, 4, 5 or 6 weeks. In some embodiments, the dose is administered once every 2 weeks. In some embodiments, the dose is administered intravenously.

[0152] In some embodiments, methods are provided for treating cancer in a human subject in need thereof comprising administering an anti-CD39 antibody disclosed herein, wherein the antibody is administered at a dose greater than 2000 mg. In some embodiments, the dose is administered as a dosage once every 1, 2, 3, 4, 5 or 6 weeks. In some embodiments, the dose is administered once every 2 weeks. In some embodiments, the dose is administered intravenously.

[0153] In some embodiments, methods are provided for treating cancer in a human subject in need thereof comprising administering an anti-CD39 antibody disclosed herein, wherein the antibody is administered at a dose between 20-2000 mg. In some embodiments, the antibody is administered once every 1, 2, 3, 4, 5 or 6 weeks. In some embodiments, the antibody is administered at a dose of 20 mg, once every 1 week. In some embodiments, the antibody is administered at a dose of 20 mg, once every 2 weeks. In some embodiments, the antibody is administered at a dose of 20 mg, once every 3 weeks. In some embodiments, the antibody is administered at a dose of 20 mg, once every 4 weeks. In some embodiments, the antibody is administered at a dose of 20 mg, once every 5 weeks. In some embodiments, the antibody is administered at a dose of 20 mg, once every 6 weeks. In some embodiments, the antibody is administered at a dose of 70 mg, once every 1 week. In some embodiments, the antibody is administered at a dose of 70 mg, once every 2 weeks. In some embodiments, the antibody is administered at a dose of 70 mg, once every 3 weeks. In some embodiments, the antibody is administered at a dose of 70 mg, once every 4 weeks. In some embodiments, the antibody is administered at a dose of 70 mg, once every 5 weeks. In some embodiments, the antibody is administered at a dose of 70 mg, once every 6 weeks. In some embodiments, the antibody is administered at a dose of 200 mg, once every 1 week. In some embodiments, the antibody is administered at a dose of 200 mg, once every 2 weeks. In some embodiments, the antibody is administered at a dose of 200 mg, once every 3 weeks. In some embodiments, the antibody is administered at a dose of 200 mg, once every 4 weeks. In some embodiments, the antibody is administered at a dose of 200 mg, once every 5 weeks. In some embodiments, the antibody is administered at a dose of 200 mg, once every 6 weeks. In some embodiments, the antibody is administered at a dose of 700 mg, once every 1 week. In some embodiments, the antibody is administered at a dose of 700 mg, once every 2 weeks. In some embodiments, the antibody is administered at a dose of 700 mg, once every 3 weeks. In some embodiments, the antibody is administered at a dose of 700 mg, once every 4 weeks. In some embodiments, the antibody is administered at a dose of 700 mg, once every 5 weeks. In some embodiments, the antibody is administered at a dose of 700 mg, once every 6 weeks. In some embodiments, the antibody is administered at a dose of 1400 mg, once every 1 week. In some embodiments, the antibody is administered at a dose of 1400 mg, once every 2 weeks. In some embodiments, the antibody is administered at a dose of 1400 mg, once every 3 weeks. In some embodiments, the antibody is administered at a dose of 1400 mg, once every 4 weeks. In some embodiments, the antibody is administered at a dose of 1400 mg, once every 5 weeks. In some embodiments, the antibody is administered at a dose of 1400 mg, once every 6 weeks. In some embodiments, the antibody is administered at a dose of 2000 mg, once every 1 week. In some embodiments, the antibody is administered at a dose of 2000 mg, once every 2 weeks. In some embodiments, the antibody is administered at a dose of 2000 mg, once every 3 weeks. In some embodiments, the antibody is administered at a dose of 2000 mg, once every 4 weeks. In some embodiments, the antibody is administered at a dose of 2000 mg, once every 5 weeks. In some embodiments, the antibody is administered at a dose of 2000 mg, once every 6 weeks. In some embodiments, the dose is administered intravenously.

[0154] In some embodiments, methods of treating cancer in a human subject in need thereof are provided comprising administering an anti-CD39 antibody comprising a VH comprising the amino acid sequence of SEQ ID NO: 30012 and a VL comprising the amino acid sequence of SEQ ID NO: 30018, wherein the antibody is administered at a dose of 20, 70, 200, 700, 1400, or 2000 mg. In some embodiments, the antibody is administered at a dose between 20-2000 mg, 70-2000 mg, 200-2000 mg, 700-2000 mg, or 1400-2000 mg. In some embodiments, the dose is administered as a dosage once every 1, 2, 3, 4, 5 or 6 weeks. In some embodiments, the dose is administered once every 2 weeks. In some embodiments, the dose is administered intravenously.

[0155] In some embodiments, methods of treating cancer in a human subject in need thereof are provided comprising administering an anti-CD39 antibody comprising a VH comprising the amino acid sequence of SEQ ID NO: 30012 and a VL comprising the amino acid sequence of SEQ ID NO: 30018, wherein the antibody is administered at a dose of 20 mg every 2 weeks. In some embodiments, the dosage is administered intravenously.

[0156] In some embodiments, methods of treating cancer in a human subject in need thereof are provided comprising administering an anti-CD39 antibody comprising a VH comprising the amino acid sequence of SEQ ID NO: 30012 and a VL comprising the amino acid sequence of SEQ ID NO: 30018, wherein the antibody is administered at a dose of 70 mg every 2 weeks. In some embodiments, the dosage is administered intravenously.

[0157] In some embodiments, methods of treating cancer in a human subject in need thereof are provided comprising administering an anti-CD39 antibody comprising a VH comprising the amino acid sequence of SEQ ID NO: 30012 and a VL comprising the amino acid sequence of SEQ ID NO: 30018, wherein the antibody is administered at a dose of 200 mg every 2 weeks. In some embodiments, the dosage is administered intravenously.

[0158] In some embodiments, methods of treating cancer in a human subject in need thereof are provided comprising administering an anti-CD39 antibody comprising a VH comprising the amino acid sequence of SEQ ID NO: 30012 and a VL comprising the amino acid sequence of SEQ ID NO: 30018, wherein the antibody is administered at a dose of 700 mg every 2 weeks. In some embodiments, the dosage is administered intravenously.

[0159] In some embodiments, methods of treating cancer in a human subject in need thereof are provided comprising administering an anti-CD39 antibody comprising a VH comprising the amino acid sequence of SEQ ID NO: 30012 and a VL comprising the amino acid sequence of SEQ ID NO: 30018, wherein the antibody is administered at a dose of 1400 mg every 2 weeks. In some embodiments, the dosage is administered intravenously.

[0160] In some embodiments, methods of treating cancer in a human subject in need thereof are provided comprising administering an anti-CD39 antibody comprising a VH comprising the amino acid sequence of SEQ ID NO: 30012 and a VL comprising the amino acid sequence of SEQ ID NO: 30018, wherein the antibody is administered at a dose of 2000 mg every 2 weeks. In some embodiments, the dosage is administered intravenously.

[0161] In some embodiments, the dosages disclosed herein are administered intravenously.

[0162] In some embodiments, methods are provided for administering an anti-CD39 antibody to a human subject in need thereof at particular dosages wherein the administration results in enhancing, increasing and/or sustaining an anti-tumor immune response in the subject having a tumor. In some embodiments, the tumor is cancerous.

[0163] In further aspects, methods for treating cancer are provided where reducing or inhibiting the enzymatic activity of CD39 is desired comprising administering an anti-CD39 antibody as described herein at particular dosages. In some embodiments, methods for enhancing, increasing and/or sustaining an anti-tumor immune response in a subject having a tumor are provided comprising administering an anti-CD39 antibody as described herein at particular dosages. In some embodiments, the tumor is cancerous. In some embodiments, methods for treating cancer in a subject having cancer are provided comprising administering an anti-CD39 antibody as described herein at particular dosages.

[0164] In some aspects, methods are provided for alleviating one or more symptoms of cancer in a subject comprising administering an anti-CD39 antibody as described herein at particular dosages. In some aspects, methods are provided for reducing the number of symptoms or the severity of cancer in a subject comprising administering an anti-CD39 antibody as described herein at particular dosages. In a particular embodiment, the symptom of the cancer is a tumor, and a reduction is a reduction in size of a tumor, the failure of the tumor to grow, or the elimination of the tumor.

[0165] In some embodiments, methods for treating cancer are provided, comprising administering an effective amount of an anti-CD39 antibody described herein to a human subject at particular dosages. In some embodiments, the anti-CD39 antibody may inhibit the growth of at least one tumor in the subject. In some embodiments, methods for inhibiting CD39 in a tissue of a subject having cancer are provided, comprising administering the anti-CD39 antibody or composition described herein to the subject, wherein the administration reduces CD39 activity or total amount of CD39 in the tissue as compared to the activity or amount prior to administration. In some embodiments, methods of preventing CD39-mediated conversion of eATP and eADP to extracellular adenosine in a tissue of a subject having cancer are provided, comprising administering the anti-CD39 antibody described herein, wherein the administration reduces extracellular adenosine levels within the tumor microenvironment of the tissue. In some embodiments, methods of inhibiting CD39 activity in a tissue of a subject having cancer are provided, comprising administering the anti-CD39 antibody described herein, wherein the administration improves the ability to mount an immune response against a tumor cell.

[0166] Provided herein are methods for treating a human subject having cancer, comprising administering to the subject an effective amount of a CD39 antibody described herein, such that the subject is treated. A CD39 antibody can be used alone as a monotherapy. Alternatively, a CD39 antibody can be used in combination with one or more other therapies or agents, e.g., a second therapy (two total therapies), or a triple combination therapy (three total therapies), as described further below.

[0167] In some embodiments, the methods for treating a human subject having cancer by administration of an anti-CD39 antibody result in infiltration of innate immune cells into the tumor microenvironment. In some embodiments, the infiltration of innate immune cells is greater in a sample from an individual after administration of a therapy e.g., as compared to a sample from an untreated individual. In some embodiments, the infiltration of innate immune cells is greater than the infiltration of innate immune cells from administration of an antagonist of PD-1 (e.g., anti-PD-1 antibody). In some embodiments, the innate immune cells are myeloid cells. In some embodiments, the innate immune cells are tumor-associated macrophages. In some embodiments, the tumor-associated macrophages are positive for expression the F4/80 antigen. In some embodiments, the innate immune cells are NK cells.

[0168] A. Exemplary Anti-CD39 Antibodies

[0169] In some embodiments, the antibodies for use in the disclosed methods bind to and inhibit CD39. In some embodiments, the anti-CD39 antibodies reduce or inhibit the enzymatic activity of human CD39. In some embodiments, the anti-CD39 antibodies bind to recombinant CD39 and/or to membrane bound human CD39.

[0170] In some embodiments, the anti-CD39 antibodies bind to human CD39 with an equilibrium dissociation constant (KD) of less than 10 nM. In some embodiments, the anti-CD39 antibodies bind to human CD39 with a KD of about 1.11 nM. In some embodiments, the anti-CD39 antibodies bind to human CD39 and cynomolgus monkey CD39 but do not bind to mouse CD39 or rat CD39.

[0171] In some embodiments, the methods provide that the anti-CD39 antibodies inhibit or reduce conversion by human CD39 of extracellular adenosine triphosphate (eATP) or extracellular adenosine diphosphate (eADP) to extracellular adenosine monophosphate (eAMP). In some embodiments, the anti-CD39 antibodies increase the amount of eATP. In some embodiments, the anti-CD39 antibodies reduce or decrease the amount of extracellular adenosine. In some embodiments, the methods provide that the anti-CD39 antibodies maintain, increase or enhance an immunostimulatory level of eATP. In some embodiments, the anti-CD39 antibodies antagonize human CD39 in a tumor microenvironment of a tissue. In some embodiments, the methods provide that the anti-CD39 antibodies cross-react with cynomolgus CD39. In some embodiments, the methods provide that the anti-CD39 antibodies increase or enhance proliferation of a lymphocyte. In some embodiments, the methods provide that the anti-CD39 antibodies increase or enhance macrophage infiltration in tumors. In some embodiments, the methods provide that the antibodies bind to CD39 and inhibit CD39 within a normal or cancerous tissue. In some embodiments, the tissue is in the uterus, cervix, lung, prostate, breast, head, neck, colon, or ovary. In some embodiments, the tissue is in the uterus. In some embodiments, within the uterus, the antibodies inhibit CD39 in the myometrium.

[0172] The Sequence Table below provides the sequences of certain embodiments of the anti-CD39 antibodies disclosed and claimed herein.

[0173] In some embodiments, the anti-CD39 antibody for use in the disclosed methods comprises a fully human immunoglobulin G4 (IgG4) antibody.

[0174] In some embodiments, the administration of the anti-CD39 antibody reduces CD39 activity or total amount of CD39 in the tissue as compared to the activity or amount prior to administration. In some embodiments, the anti-CD39 antibody is administered at a dosage that sustains full target occupancy.

[0175] Clone 22, disclosed in the Sequence Table herein, is a fully human anti-CD39 monoclonal antibody that binds to human CD39 with nanomolar affinity and potently inhibits its enzymatic activity. Clone 22 prevents CD39-mediated conversion of ATP and adenosine diphosphate (ADP) to adenosine monophosphate (AMP) and phosphate, leading to a reduction in adenosine levels within the TME.

[0176] In some embodiments, the anti-CD39 comprises a VH comprising the HCDR1, HCDR2, and HCDR3 and a VL comprising a LCDR1, LCDR2, and LCDR3 of clone 22.

[0177] In some embodiments, the anti-CD39 antibody comprises: (a) HCDR1 comprising the amino acid sequence of SEQ ID NO: 30001; (b) HCDR2 comprising the amino acid sequence of SEQ ID NO: 30002; (c) HCDR3 comprising the amino acid sequence of SEQ ID NO: 30003; (d) LCDR1 comprising the amino acid sequence of SEQ ID NO: 30004; (e) LCDR2 comprising the amino acid sequence of SEQ ID NO: 30005; and (f) LCDR3 comprising the amino acid sequence of SEQ ID NO: 30006.

[0178] In certain embodiments, the anti-CD39 antibody comprises a VH comprising the amino acid sequence of the VH of clone 22.

[0179] In some embodiments, the anti-CD39 antibody comprises the VH of clone 22 but with 1, 2, 3, 4, or 5 amino acid substitutions outside the complementarity determining regions (CDRs), such as 1, 2, 3, 4, or 5 conservative substitutions outside the CDRs. In some embodiments, the antiCD39 antibody comprises the VH of clone 22 but with 1, 2, 3, 4, or 5 reversion substitutions outside the complementarity determining regions (CDRs).

[0180] In some embodiments, the anti-CD39 antibody comprises the VH of clone 22 but with 1, 2, 3, 4, or 5 amino acid substitutions in the framework regions of the VH sequence, such as 1, 2, 3, 4, or 5 conservative substitutions. In some embodiments, the anti-CD39 antibody comprises the VH of antibody clone 22 but with 1, 2, 3, 4, or 5 reversion substitutions in the framework regions of the VL sequence.

[0181] In some embodiments, the anti-CD39 antibody comprises the VH and VL CDRs of clone 22, wherein each CDR comprises 0, 1, 2 or 3 amino acid additions, substitutions (e.g., conservative substitutions), or deletions.

[0182] In certain embodiments, the anti-CD39 antibody comprises a VH CDR1, CDR2, and CDR3 comprising the amino acid sequences of the VH CDRs of clone 22 and comprises a VH that is at least 90%, at least 91%, at least 92%, at least 93%, at least 94%, at least 95%, at least 96%, at least 97%, at least 98%, or at least 99% identical to the VH of clone 22. In certain embodiments, the anti-CD39 antibody comprises a VH comprising an amino acid sequence that is at least 90%, at least 91%, at least 92%, at least 93%, at least 94%, at least 95%, at least 96%, at least 97%, at least 98%, or at least 99% identical to the amino acid sequence of the VH of clone 22. In certain embodiments, the VH of the anti-CD39 antibody differs from that of the VH sequences shown in the Sequence Table due to 1, 2, 3, 4, or 5 amino acid substitutions in the framework regions of the VH sequence, such as 1, 2, 3, 4, or 5 conservative substitutions. In certain embodiments, the VH of the anti-CD39 antibody differs from that of the VH sequences shown in the Sequence Table due to 1, 2, 3, 4, or 5 reversion substitutions in the framework regions of the VH sequence.

[0183] In certain embodiments, the anti-CD39 antibody comprises a VL comprising the amino acid sequence of the VL of clone 22.

[0184] In some embodiments, the-anti CD39 antibody comprises the VL of clone 22 but with 1, 2, 3, 4, or 5 amino acid substitutions outside the complementarity determining regions (CDRs), such as 1, 2, 3, 4, or 5 conservative substitutions outside the CDRs. In some embodiments, the anti-CD39 antibody comprises the VL of clone 22 but with 1, 2, 3, 4, or 5 reversion substitutions outside the complementarity determining regions (CDRs).

[0185] In some embodiments, the anti-CD39 antibody comprises the VL of clone 22 but with 1, 2, 3, 4, or 5 amino acid substitutions in the framework regions of the VL sequence, such as 1, 2, 3, 4, or 5 conservative substitutions. In some embodiments, the anti-CD39 antibody comprises the VL of antibody clone 22 but with 1, 2, 3, 4, or 5 reversion substitutions in the framework regions of the VL sequence.

[0186] In certain embodiments, the anti-CD39 antibody comprises a VL CDR1, CDR2, and CDR3 comprising the amino acid sequences of the VL CDRs of clone 22 and comprises a VL that is at least 90%, at least 91%, at least 92%, at least 93%, at least 94%, at least 95%, at least 96%, at least 97%, at least 98%, or at least 99% identical to the VL of clone 22. In certain embodiments, the anti-CD39 antibody comprises a VL comprising an amino acid sequence that is at least 90%, at least 91%, at least 92%, at least 93%, at least 94%, at least 95%, at least 96%, at least 97%, at least 98%, or at least 99% identical to the amino acid sequence of the VL of clone 22. In certain embodiments, the VL of the anti-CD39 antibody differs from that of the VL sequences shown in the Sequence Table due to 1, 2, 3, 4, or 5 amino acid substitutions in the framework regions of the VL sequence, such as 1, 2, 3, 4, or 5 conservative substitutions. In certain embodiments, the VL of the anti-CD39 antibody differs from that of the VL sequences shown in the Sequence Table due to 1, 2, 3, 4, or 5 reversion substitutions in the framework regions of the VL sequence.

[0187] In certain embodiments, the anti-CD39 antibody comprises a VH comprising the amino acid sequence of the VH of clone 22. In certain embodiments, the anti-CD39 antibody comprises a VL comprising the amino acid sequence of the VL of clone 22. In certain embodiments, the anti-CD39 antibody comprises a VH comprising the amino acid sequence of the VH of antibody clone number 22 and a VL comprising the amino acid sequence of the VL of antibody clone number 22.

[0188] In certain embodiments, the anti-CD39 antibody comprises a VH consisting of the amino acid sequence of the VH of clone 22. In certain embodiments, the anti-CD39 antibody comprises a VL consisting of the amino acid sequence of the VL of clone 22. In certain embodiments, the anti-CD39 antibody comprises a VH consisting of the amino acid sequence of the VH of antibody clone number 22 and a VL consisting of the amino acid sequence of the VL of antibody clone number 22.

[0189] In some embodiments, the anti-CD39 antibody comprises a VH comprising the VH CDRs of the VH of antibody clone number 22, and a VL comprising the VL CDRs of antibody clone number 22, and VH and VL amino acid sequences that are at least 90%, at least 91%, at least 92%, at least 93%, at least 94%, at least 95%, at least 96%, at least 97%, at least 98%, or at least 99% identical to the VH and VL of antibody clone number 22.

[0190] In some embodiments, the anti-CD39 antibody comprises a VH and VL, wherein the VH is at least 90%, 91%, 92%, 93%, 94%, 95%, 96%, 97%, 98%, 99%, or 100% identical to the amino acid sequence of SEQ ID NO: 30012 and the VL is at least 90%, 91%, 92%, 93%, 94%, 95%, 96%, 97%, 98%, 99%, or 100% identical to the amino acid sequence of SEQ ID NO: 30018.

[0191] In some embodiments, the anti-CD39 antibody is an IgG antibody, such as IgG1, IgG2, IgG3 or IgG4 antibody or a modified form thereof as described in the section below. In some embodiments, the constant region has effector function, and in some embodiments, the constant region is effector-less.

[0192] In certain embodiments, the anti-CD39 antibody comprises a heavy chain (HC) comprising the amino acid sequence of the heavy chain of clone 22.

[0193] In some embodiments, the anti-CD39 antibody may comprise: a heavy chain comprising the amino acid sequence of the heavy chain of antibody clone number 22 and a light chain comprising the light chain amino acid sequence of antibody clone number 22.

[0194] In some embodiments, the anti-CD39 antibody may comprise: a HC comprising the HC CDRs of the HC of antibody clone number 22, and a light chain (LC) comprising the LC CDRs of antibody clone number 22 and HC and LC amino acid sequences that are at least 90%, at least 91%, at least 92%, at least 93%, at least 94%, at least 95%, at least 96%, at least 97%, at least 98%, or at least 99% identical to the HC and LC of antibody clone number 22, respectively.

[0195] In some of the above embodiments, the HC and/or LC may differ from the sequence of each of the species by the presence of 1, 2, 3, 4, or 5 amino acid substitutions, such as 1, 2, 3, 4, or 5 conservative substitutions. In some of the above embodiments, the HC and/or LC may differ from the sequence of each of the species by the presence of 1, 2, 3, 4, or 5 amino acid substitutions, such as 1, 2, 3, 4, or 5 reversion substitutions.

[0196] In certain embodiments, the anti-CD39 antibody is an antibody fragment. Antibody fragments include, but are not limited to, Fab, Fab′, Fab′-SH, F(ab′)2, Fv, and scFv fragments, and other fragments described below. For a review of certain antibody fragments, see Hudson et al. Nat. Med. 9:129-134 (2003). For a review of scFv fragments, see, e.g., Pluckthun, in The Pharmacology of Monoclonal Antibodies, vol. 113, Rosenburg and Moore eds., (Springer-Verlag, New York), pp. 269-315 (1994); see also WO 93/16185; and U.S. Pat. Nos. 5,571,894 and 5,587,458. For discussion of Fab and F(ab′)2 fragments comprising salvage receptor binding epitope residues and having increased in vivo half-life, see U.S. Pat. No. 5,869,046.

[0197] Antibody fragments can be made by various techniques, including but not limited to proteolytic digestion of an intact antibody as well as production by recombinant host cells (e.g. E. coli or phage), as described herein.

[0198] B. Recombinant Methods

[0199] Antibodies may be produced using recombinant methods and compositions, e.g., as described in U.S. Pat. No. 4,816,567, or as described in WO2019178269. In some embodiments, an isolated nucleic acid(s) encoding an anti-CD39 antibody described herein is provided. Such nucleic acid(s) may encode an amino acid sequence comprising the VL and/or an amino acid sequence comprising the VH of the antibody (e.g., the light and/or heavy chains of the antibody). In a further embodiment, one or more vectors (e.g., expression vectors) comprising such nucleic acid(s) are provided. In a further embodiment, a host cell comprising such nucleic acid(s) is provided. In one such embodiment, a host cell comprises (e.g., has been transformed with): (1) a vector comprising a nucleic acid that encodes an amino acid sequence comprising the VL of the antibody and an amino acid sequence comprising the VH of the antibody, or (2) a first vector comprising a nucleic acid that encodes an amino acid sequence comprising the VL of the antibody and a second vector comprising a nucleic acid that encodes an amino acid sequence comprising the VH of the antibody. In some embodiments, the host cell is eukaryotic, e.g. a Chinese Hamster Ovary (CHO) cell or lymphoid cell (e.g., Y0, NS0, Sp20 cell). In some embodiments, a method of making an anti-CD39 antibody is provided, wherein the method comprises culturing a host cell comprising a nucleic acid encoding the antibody, as provided above, under conditions suitable for expression of the antibody, and optionally recovering the antibody from the host cell (or host cell culture medium).

[0200] For recombinant production of an anti-CD39 antibody, a nucleic acid(s) encoding an antibody, e.g., as described above, is isolated and inserted into one or more vectors for further cloning and/or expression in a host cell. Such nucleic acid(s) may be readily isolated and sequenced using conventional procedures (e.g., by using oligonucleotide probes that are capable of binding specifically to genes encoding the heavy and light chains of the antibody).

[0201] Suitable host cells for cloning or expression of antibody-encoding vectors include prokaryotic or eukaryotic cells described herein. For example, antibodies may be produced in bacteria, in particular when glycosylation and Fc effector function are not needed. For expression of antibody fragments and polypeptides in bacteria, see, e.g., U.S. Pat. Nos. 5,648,237, 5,789,199, and 5,840,523. (See also Charlton, Methods in Molecular Biology, Vol. 248 (B. K. C. Lo, ed., Humana Press, Totowa, N.J., 2003), pp. 245-254, describing expression of antibody fragments in E. coli.) After expression, the antibody may be isolated from the bacterial cell paste in a soluble fraction and can be further purified.

[0202] In addition to prokaryotes, eukaryotic microbes such as filamentous fungi or yeast are suitable cloning or expression hosts for antibody-encoding vectors, including fungi and yeast strains whose glycosylation pathways have been “humanized,” resulting in the production of an antibody with a partially or fully human glycosylation pattern. See Gerngross, Nat. Biotech. 22:1409-1414 (2004), and Li et al., Nat. Biotech. 24:210-215 (2006).

[0203] Suitable host cells for the expression of glycosylated antibody are also derived from multicellular organisms (invertebrates and vertebrates). Examples of invertebrate cells include plant and insect cells. Numerous baculoviral strains have been identified which may be used in conjunction with insect cells, particularly for transfection of Spodoptera frugiperda cells.

[0204] Plant cell cultures can also be utilized as hosts. See, e.g., U.S. Pat. Nos. 5,959,177, 6,040,498, 6,420,548, 7,125,978, and 6,417,429 (describing PLANTIBODIES™ technology for producing antibodies in transgenic plants).

[0205] Vertebrate cells may also be used as hosts. For example, mammalian cell lines that are adapted to grow in suspension may be useful. Other examples of useful mammalian host cell lines are monkey kidney CV1 line transformed by SV40 (COS-7); human embryonic kidney line (293 or 293 cells as described, e.g., in Graham et al., J. Gen Virol. 36:59 (1977)); baby hamster kidney cells (BHK); mouse sertoli cells (TM4 cells as described, e.g., in Mather, Biol. Reprod. 23:243-251 (1980)); monkey kidney cells (CV1); African green monkey kidney cells (VERO-76); human cervical carcinoma cells (HELA); canine kidney cells (MDCK; buffalo rat liver cells (BRL 3A); human lung cells (W138); human liver cells (Hep G2); mouse mammary tumor (MMT 060562); TRI cells, as described, e.g., in Mather et al., Annals N.Y. Acad. Sci. 383:44-68 (1982); MRC 5 cells; and FS4 cells. Other useful mammalian host cell lines include Chinese hamster ovary (CHO) cells, including DHFR-CHO cells (Urlaub et al., Proc. Natl. Acad. Sci. USA 77:4216 (1980)); and myeloma cell lines such as Y0, NS0 and Sp2/0. For a review of certain mammalian host cell lines suitable for antibody production, see, e.g., Yazaki and Wu, Methods in Molecular Biology, Vol. 248 (B. K. C. Lo, ed., Humana Press, Totowa, N.J.), pp. 255-268 (2003).

[0206] C. Pharmaceutical Compositions

[0207] In some embodiments, pharmaceutical compositions are provided comprising an anti-CD39 antibody and a pharmaceutically acceptable carrier, wherein the anti-CD39 antibody is formulated for administration at a dose of 20, 70, 200, 700, 1400, or 2000 mg. In some embodiments, pharmaceutical compositions are provided comprising an anti-CD39 antibody comprising:
[0208] (a) six CDRs comprising:
   [0209] i. HCDR1 comprising the amino acid sequence of SEQ ID NO: 30001;
   [0210] ii. HCDR2 comprising the amino acid sequence of SEQ ID NO: 30002;
   [0211] iii. HCDR3 comprising the amino acid sequence of SEQ ID NO: 30003;
   [0212] iv. LCDR1 comprising the amino acid sequence of SEQ ID NO: 30004;
   [0213] v. LCDR2 comprising the amino acid sequence of SEQ ID NO: 30005; and
   [0214] vi. LCDR3 comprising the amino acid sequence of SEQ ID NO: 30006; or
[0215] (b) a VH comprising the amino acid sequence of SEQ ID NO: 30012 and a VL comprises the amino acid sequence of SEQ ID NO: 30018;
   and a pharmaceutical carrier, wherein the anti-CD39 antibody is formulated for administration at a dose of 20, 70, 200, 700, 1400, or 2000 mg.

[0216] In some embodiments, the pharmaceutical composition is for use in treating cancer in a human subject in need thereof. In some embodiments of the pharmaceutical composition, the anti-CD39 antibody is administered intravenously. In some embodiments, the anti-CD39 antibody is administered once every 1, 2, 3, 4, 5 or 6 weeks. In some embodiments, the anti-CD39 antibody is administered once every two weeks.

[0217] D. Treatment Measures

[0218] In some embodiments, results of the treatment methods provided herein are evaluated. In some embodiments, disease progression of the subject having cancer may evaluated using known response evaluation criteria (e.g., Response Evaluation Criteria in Solid Tumors (RECIST)). In some embodiments, response to treatment is evaluated using tumor biopsies. In some embodiments, response to treatment is evaluated using a CT scan of chest, abdomen, pelvis, fluorodeoxyglucose-positron emission tomography, and/or magnetic resonance imaging. In some embodiments, response to treatment is evaluated by measuring antidrug antibodies, electrocardiograms (ECGs), and/or safety laboratory values. In some embodiments, response to treatment is evaluated by measuring levels of anti-CD39 antibody target occupancy and/or serum concentrations of anti-CD39 antibody. In some embodiments, response to treatment is evaluated by measuring levels of intratumoral CD39 enzymatic activity. In some embodiments, the objective response rate (ORR), duration of response (DoR), disease control rate (DCR), progression-free survival (PFS), and landmark PFS rate are determined. In some embodiments, response to treatment is evaluated by measuring changes in selected blood, serum/plasma, cytokines, and/or tumor tissue biomarkers, which may include gene and protein expression levels, tumor DNA mutation and copy number variations, and immune cell population subset enumeration and evaluation. In some embodiments, response to treatment is evaluated by measuring germline DNA polymorphic sequence variations in relation to the PK, pharmacodynamics, safety, and/or preliminary efficacy of the anti-CD39 antibody. In some embodiments, response to treatment is evaluated by measuring serum concentrations of the combination therapy agents.

[0219] E. Diseases and Disorders

[0220] In the methods for treating cancer provided herein, cancers can be cancers with solid tumors or blood malignancies (e.g., liquid tumors). In some embodiments, the cancer is newly diagnosed. In some embodiments, the cancer is non-metastatic. In some embodiments, the cancer is advanced. In some embodiments, the cancer is relapsed. In some embodiments, the cancer is refractory. In some embodiments, the cancer is metastatic. In some embodiments, the cancer is a solid tumor. In some embodiments, the cancer is an advanced solid tumor. In some embodiments, the cancer is a relapsed solid tumor. In some embodiments the cancer is a refractory solid tumor. In some embodiments, the cancer is a metastatic solid tumor. In some embodiments, the cancer is an advanced, relapsed solid tumor. In some embodiments, the cancer is an advanced, refractory solid tumor. In some embodiments, the cancer is an advanced, metastatic solid tumor. In some embodiments, the cancer is a relapsed, refractory solid tumor. In some embodiments, the cancer is a relapsed, metastatic solid tumor. In some embodiments, the cancer is a refractory, metastatic tumor. In some embodiments, the tumor is an advanced, relapsed, refractory solid tumor. In some embodiments, the cancer is an advanced, relapsed, metastatic tumor. In some embodiments, the cancer is an advanced, refractory, metastatic tumor. In some embodiments, the cancer is a relapsed, refractory, metastatic solid tumor. In some embodiments, the tumor is an advanced, relapsed, refractory, metastatic solid tumor.

[0221] Non-limiting examples of cancers for treatment include squamous cell carcinoma, small-cell lung cancer, non-small cell lung cancer, squamous non-small cell lung cancer (NSCLC), nonsquamous NSCLC, glioma, gastrointestinal cancer, renal cancer (e.g., clear cell carcinoma), ovarian cancer, liver cancer, hepatocellular carcinoma (HCC), colorectal cancer, endometrial cancer, kidney cancer (e.g., renal cell carcinoma (RCC)), prostate cancer (e.g., hormone refractory prostate adenocarcinoma), thyroid cancer, neuroblastoma, pancreatic cancer, glioblastoma (glioblastoma multiforme), cervical cancer, stomach cancer, bladder cancer, hepatoma, breast cancer, colon carcinoma, and head and neck cancer (or carcinoma), gastric cancer, germ cell tumor, sarcoma, sinonasal natural killer, melanoma (e.g., malignant melanoma, such as cutaneous or intraocular malignant melanoma and metastatic malignant melanoma), bone cancer, skin cancer, uterine cancer, cancer of the anal region, testicular cancer, carcinoma of the fallopian tubes, carcinoma of the endometrium, carcinoma of the cervix, carcinoma of the vagina, carcinoma of the vulva, cancer of the esophagus, cancer of the small intestine, cancer of the endocrine system, cancer of the parathyroid gland, cancer of the adrenal gland, sarcoma of soft tissue, cancer of the urethra, cancer of the penis, solid tumors of childhood, cancer of the ureter, carcinoma of the renal pelvis, neoplasm of the central nervous system (CNS), primary CNS lymphoma, angiosarcoma, spinal axis tumor, brain cancer, brain stem glioma, pituitary adenoma, Kaposi's sarcoma, epidermoid cancer, squamous cell cancer, T cell lymphoma, environmentally-induced cancers including those induced by asbestos, virus-related cancers or cancers of viral origin (e.g., human papilloma virus (HPV-related or -originating tumors)), and hematologic malignancies derived from either of the two major blood cell lineages, i.e., the myeloid cell line (which produces granulocytes, erythrocytes, thrombocytes, macrophages and mast cells) or lymphoid cell line (which produces B, T, NK and plasma cells), such as all types of leukemias, lymphomas, and myelomas, e.g., acute, chronic, lymphocytic and/or myelogenous leukemias, such as acute leukemia (ALL), acute myelogenous leukemia (AML), chronic lymphocytic leukemia (CLL), and chronic myelogenous leukemia (CML), undifferentiated AML (MO), myeloblastic leukemia (M1), myeloblastic leukemia (M2; with cell maturation), promyelocytic leukemia (M3 or M3 variant [M3V]), myelomonocytic leukemia (M4 or M4 variant with eosinophilia [M4E]), monocytic leukemia (M5), erythroleukemia (M6), megakaryoblastic leukemia (M7), isolated granulocytic sarcoma, and chloroma; lymphomas, such as Hodgkin's lymphoma (HL), non-Hodgkin's lymphoma (NHL), B cell hematologic malignancy, e.g., B cell lymphomas, T cell lymphomas, lymphoplasmacytoid lymphoma, monocytoid B-cell lymphoma, mucosa-associated lymphoid tissue (MALT) lymphoma, anaplastic (e.g., Ki 1+) large-cell lymphoma, adult T cell lymphoma/leukemia, mantle cell lymphoma, angio immunoblastic T cell lymphoma, angiocentric lymphoma, intestinal T cell lymphoma, primary mediastinal B-cell lymphoma, precursor T-lymphoblastic lymphoma, T-lymphoblastic; and lymphoma/leukaemia (T-Lbly/T-ALL), peripheral T cell lymphoma, lymphoblastic lymphoma, post-transplantation lymphoproliferative disorder, true histiocytic lymphoma, primary effusion lymphoma, B cell lymphoma, lymphoblastic lymphoma (LBL), hematopoietic tumors of lymphoid lineage, acute lymphoblastic leukemia, diffuse large B-cell lymphoma, Burkitt's lymphoma, follicular lymphoma, diffuse histiocytic lymphoma (DHL), immunoblastic large cell lymphoma, precursor B-lymphoblastic lymphoma, cutaneous T cell lymphoma (CTLC) (also called mycosis fungoides or Sezary syndrome), and lymphoplasmacytoid lymphoma (LPL) with Waldenstrom's macroglobulinemia; myelomas, such as IgG myeloma, light chain myeloma, nonsecretory myeloma, smoldering myeloma (also called indolent myeloma), solitary plasmocytoma, and multiple myelomas, chronic lymphocytic leukemia (CLL), hairy cell lymphoma; hematopoietic tumors of myeloid lineage, tumors of mesenchymal origin, including fibrosarcoma and rhabdomyoscarcoma; seminoma, teratocarcinoma, tumors of the central and peripheral nervous system, including astrocytoma, oligodendroglioma, medulloblastoma, peripheral nerve sheath tumors, PNET, schwannomas; tumors of mesenchymal origin, including fibrosarcoma, rhabdomyoscaroma, and osteosarcoma; and other tumors, including xeroderma pigmentosum, keratoacanthoma, seminoma, thyroid follicular cancer and teratocarcinoma, hematopoietic tumors of lymphoid lineage, for example T cell and B cell tumors, including but not limited to T cell disorders such as T-prolymphocytic leukemia (T-PLL), including of the small cell and cerebriform cell type; large granular lymphocyte leukemia (LGL) of the T cell type; a/d T-NHL hepatosplenic lymphoma; peripheral/post-thymic T cell lymphoma (pleomorphic and immunoblastic subtypes); angiocentric (nasal) T cell lymphoma; cancer of the head or neck, renal cancer, rectal cancer, cancer of the thyroid gland; acute myeloid lymphoma, as well as any combinations of said cancers. The methods described herein can be used for treatment of metastatic cancers, and/or unresectable cancers, and/or relapsed cancers, and/or refractory cancers, and/or advanced cancers, and/or recurrent cancers. The methods described herein can be used for treatment of pancreatic cancer. The methods described herein can be used for treatment of gastric cancer.

[0222] The methods described herein can be used for treatment of prostate cancer. The methods described herein can be used for treatment of endometrial cancer. The methods described herein can be used for treatment of non-small cell lung cancer. The methods described herein can be used for treatment of colorectal cancer. The methods described herein can be used for the treatment of ovarian cancer.

[0223] In certain embodiments, an antibody described herein is administered to subjects having a cancer that has exhibited an inadequate response to, or progressed on, a prior treatment, e.g., a prior treatment with an immuno-oncology or immunotherapy drug. In some embodiments, the cancer is refractory or resistant to a prior treatment, either intrinsically refractory or resistant (e.g., refractory to a PD-1 pathway antagonist or other immune checkpoint therapy including CTLA4 inhibitors), or a resistance or refractory state is acquired. For example, an antibody described herein may be administered to subjects who are not responsive or not sufficiently responsive to a first therapy or who have disease progression following treatment, e.g., immune checkpoint therapies including anti-PD-1 pathway antagonist treatment or CTLA4 inhibitors, either alone or in combination with another therapy (e.g., with an anti-PD-1 pathway antagonist therapy). In other embodiments, an antibody described herein is administered to subjects who have not previously received (i.e., been treated with) an immuno-oncology agent, e.g., a PD-1 pathway antagonist.

[0224] F. Combinations

[0225] The methods of treating cancer provided herein may comprise administering an anti-CD39 antibody at particular doses and dosages disclosed herein in combination with one or more additional therapeutic agents. In some embodiments, the anti-CD39 antibody is administered with one additional therapy or agent (e.g., also sometimes referred to herein as a second therapy). In some embodiments, the anti-CD39 antibody may be used in combination with at least one additional therapeutic agent (e.g., further comprising administering a second therapy, or further comprising administering a second therapy and a third therapy (a triple-combination of cancer therapies) or further comprising administering a second therapy, a third therapy and a fourth therapy (a quadruple combination of cancer therapies)).

[0226] In some embodiments, targeting an additional independent inhibitory pathway or combinations thereof has the potential to lead to further enhanced immune cell activation beyond monotherapy.

[0227] In some embodiments, methods are provided for enhancing, increasing and/or sustaining an anti-tumor immune response in a subject comprising administering an anti-CD39 antibody to a subject having a tumor at particular dosages disclosed herein, wherein the method further comprises administering a second therapy. In some embodiments, methods are provided for enhancing, increasing and/or sustaining an anti-tumor immune response in a subject comprising administering an anti-CD39 antibody to a subject having a tumor at particular dosages disclosed herein, wherein the method further comprises administering a second therapy and a third therapy.

[0228] In some embodiments, methods are provided for treating cancer in a subject comprising administering an anti-CD39 antibody to a subject having cancer at particular doses and dosages disclosed herein, wherein the method further comprises administering a second therapy. In some embodiments, methods are provided for treating cancer in a subject comprising administering an anti-CD39 antibody to a subject having cancer at particular doses and dosages disclosed herein, wherein the method further comprises administering a second therapy and a third therapy. In some embodiments, methods are provided for inhibiting CD39 in tissue of a subject having cancer comprising administering an anti-CD39 antibody to a subject having cancer at particular doses and dosages disclosed herein, wherein the administration reduces CD39 activity or total amount of CD39 in the tissue as compared to the activity or amount prior to administration, and wherein the method further comprises administering a second therapy. In some embodiments, methods are provided for inhibiting CD39 in tissue of a subject having cancer comprising administering an anti-CD39 antibody to a subject having cancer at particular doses and dosages disclosed herein, wherein the administration reduces CD39 activity or total amount of CD39 in the tissue as compared to the activity or amount prior to administration, and wherein the method further comprises administering a second therapy and a third therapy.

[0229] In some embodiments, methods are provided for enhancing, increasing and/or sustaining an anti-tumor immune response in a subject comprising administering an anti-CD39 antibody to a subject having a tumor at particular doses and dosages disclosed herein, wherein the method further comprises administering a second therapy, wherein the second therapy is an antagonist of PD-1 or PD-L1. In some embodiments, methods are provided for enhancing, increasing and/or sustaining an anti-tumor immune response in a subject comprising administering an anti-CD39 antibody to a subject having a tumor at particular doses and dosages disclosed herein, wherein the method further comprises administering an antagonist of PD-1 or PD-L1 and a third therapy that is different from the first and second.

[0230] In some embodiments, methods are provided for treating cancer in a subject comprising administering an anti-CD39 antibody to a subject having cancer at particular doses and dosages disclosed herein, wherein the method further comprises administering a second therapy, wherein the second therapy is an antagonist of PD-1 or PD-L1. In some embodiments, methods are provided for treating cancer in a subject comprising administering an anti-CD39 antibody to a subject having cancer at particular dosages disclosed herein, wherein the method further comprises administering an antagonist of PD-1 or PD-L1 and a third therapy.

[0231] In some embodiments, methods are provided for inhibiting CD39 in tissue of a subject having cancer comprising administering an anti-CD39 antibody to a subject having cancer at particular dosages disclosed herein, wherein the administration reduces CD39 activity or total amount of CD39 in the tissue as compared to the activity or amount prior to administration, and wherein the method further comprises administering a second therapy, wherein the second therapy is an antagonist of PD-1 or PD-L1. In some embodiments, methods are provided for inhibiting CD39 in tissue of a subject having cancer comprising administering an anti-CD39 antibody to a subject having cancer at particular dosages disclosed herein, wherein the administration reduces CD39 activity or total amount of CD39 in the tissue as compared to the activity or amount prior to administration, and wherein the method further comprises administering an antagonist of PD-1 or PD-L1 and a third therapy.

[0232] In some embodiments, methods are provided for enhancing, increasing and/or sustaining an anti-tumor immune response in a subject comprising administering an anti-CD39 antibody to a subject having a tumor at particular dosages disclosed herein, wherein the method further comprises administering a second therapy, wherein the second therapy is an antagonist of PD-Li. In some embodiments, methods are provided for enhancing, increasing and/or sustaining an anti-tumor immune response in a subject comprising administering an anti-CD39 antibody to a subject having a tumor at particular dosages disclosed herein, wherein the method further comprises administering an antagonist of PD-L1 and a third therapy.

[0233] In some embodiments, methods are provided for treating cancer in a subject comprising administering an anti-CD39 antibody to a subject having cancer at particular dosages disclosed herein, wherein the method further comprises administering a second therapy, wherein the second therapy is an antagonist of PD-L1. In some embodiments, methods are provided for treating cancer in a subject comprising administering an anti-CD39 antibody to a subject having cancer at particular dosages disclosed herein, wherein the method further comprises administering an antagonist of PD-L1 and a third therapy.

[0234] In some embodiments, methods are provided for inhibiting CD39 in tissue of a subject having cancer comprising administering an anti-CD39 antibody to a subject having cancer at particular dosages disclosed herein, wherein the administration reduces CD39 activity or total amount of CD39 in the tissue as compared to the activity or amount prior to administration, and wherein the method further comprises administering a second therapy, wherein the second therapy is an antagonist of PD-L1. In some embodiments, methods are provided for inhibiting CD39 in tissue of a subject having cancer comprising administering an anti-CD39 antibody to a subject having cancer at particular dosages disclosed herein, wherein the administration reduces CD39 activity or total amount of CD39 in the tissue as compared to the activity or amount prior to administration, and wherein the method further comprises administering an antagonist of PD-L1 and a third therapy.

[0235] In some embodiments, methods are provided for enhancing, increasing and/or sustaining an anti-tumor immune response in a subject comprising administering an anti-CD39 antibody to a subject having a tumor at particular dosages disclosed herein, wherein the method further comprises administering a second therapy, wherein the second therapy is an antagonist of CD73. In some embodiments, methods are provided for enhancing, increasing and/or sustaining an anti-tumor immune response in a subject comprising administering an anti-CD39 antibody to a subject having a tumor at particular dosages disclosed herein, wherein the method further comprises administering an antagonist of CD73 and a third therapy.

[0236] In some embodiments, methods are provided for treating cancer in a subject comprising administering an anti-CD39 antibody to a subject having cancer at particular dosages disclosed herein, wherein the method further comprises administering a second therapy, wherein the second therapy is an antagonist of CD73. In some embodiments, methods are provided for treating cancer in a subject comprising administering an anti-CD39 antibody to a subject having cancer at particular dosages disclosed herein, wherein the method further comprises administering an antagonist of CD73 and a third therapy.

[0237] In some embodiments, methods are provided for inhibiting CD39 in tissue of a subject having cancer comprising administering an anti-CD39 antibody to a subject having cancer at particular dosages disclosed herein, wherein the administration reduces CD39 activity or total amount of CD39 in the tissue as compared to the activity or amount prior to administration, and wherein the method further comprises administering a second therapy, wherein the second therapy is an antagonist of CD73. In some embodiments, methods are provided for inhibiting CD39 in tissue of a subject having cancer comprising administering an anti-CD39 antibody to a subject having cancer at particular dosages disclosed herein, wherein the administration reduces CD39 activity or total amount of CD39 in the tissue as compared to the activity or amount prior to administration, and wherein the method further comprises administering an antagonist of CD73 and a third therapy.

[0238] In some embodiments, methods are provided for enhancing, increasing and/or sustaining an anti-tumor immune response in a subject comprising administering an anti-CD39 antibody to a subject having a tumor at particular dosages disclosed herein, wherein the method further comprises administering a second therapy, wherein the second therapy is an A2AR antagonist, an A2BR antagonist, or a dual A2AR/A2B antagonist. In some embodiments, methods are provided for enhancing, increasing and/or sustaining an anti-tumor immune response in a subject comprising administering an anti-CD39 antibody to a subject having a tumor at particular dosages disclosed herein, wherein the method further comprises administering an A2AR antagonist, an A2BR antagonist, or a dual A2AR/A2B antagonist and a third therapy.

[0239] In some embodiments, methods are provided for treating cancer in a subject comprising administering an anti-CD39 antibody to a subject having cancer at particular dosages disclosed herein, wherein the method further comprises administering a second therapy, wherein the second therapy is an A2AR antagonist, an A2BR antagonist, or a dual A2AR/A2B antagonist. In some embodiments, methods are provided for treating cancer in a subject comprising administering an anti-CD39 antibody to a subject having cancer at particular dosages disclosed herein, wherein the method further comprises administering an A2AR antagonist, an A2BR antagonist, or a dual A2AR/A2B antagonist and a third therapy. In some embodiments, methods are provided for treating cancer in a subject comprising administering an anti-CD39 antibody comprising:
[0240] a) HCDR1 comprising the amino acid sequence of SEQ ID NO: 30001;
[0241] b) HCDR2 comprising the amino acid sequence of SEQ ID NO: 30002;
[0242] c) HCDR3 comprising the amino acid sequence of SEQ ID NO: 30003;
[0243] d) LCDR1 comprising the amino acid sequence of SEQ ID NO: 30004;
[0244] e) LCDR2 comprising the amino acid sequence of SEQ ID NO: 30005; and
[0245] f) LCDR3 comprising the amino acid sequence of SEQ ID NO: 30006;
   wherein the antibody is administered at a dose of 20, 70, 200, 700, 1400, or 2000 mg, and wherein the method further comprises administering an A2AR antagonist, an A2BR antagonist, or a dual A2AR/A2B antagonist, and a third therapy.

[0246] In some embodiments, methods are provided for inhibiting CD39 in tissue of a subject having cancer comprising administering an anti-CD39 antibody to a subject having cancer at particular dosages disclosed herein, wherein the administration reduces CD39 activity or total amount of CD39 in the tissue as compared to the activity or amount prior to administration, and wherein the method further comprises administering a second therapy, wherein the second therapy is an A2AR antagonist, an A2BR antagonist, or a dual A2AR/A2B antagonist. In some embodiments, methods are provided for inhibiting CD39 in tissue of a subject having cancer comprising administering an anti-CD39 antibody to a subject having cancer at particular dosages disclosed herein, wherein the administration reduces CD39 activity or total amount of CD39 in the tissue as compared to the activity or amount prior to administration, and wherein the method further comprises administering an A2AR antagonist, an A2BR antagonist, or a dual A2AR/A2B antagonist and a third therapy.

[0247] In some embodiments, methods are provided for enhancing, increasing and/or sustaining an anti-tumor immune response in a subject comprising administering an anti-CD39 antibody to a subject having a tumor at particular dosages disclosed herein, wherein the method further comprises administering a second therapy, wherein the second therapy is an antagonist of CD47. In some embodiments, methods are provided for enhancing, increasing and/or sustaining an anti-tumor immune response in a subject comprising administering an anti-CD39 antibody to a subject having a tumor at particular dosages disclosed herein, wherein the method further comprises administering an antagonist of CD47 and a third therapy.

[0248] In some embodiments, methods are provided for treating cancer in a subject comprising administering an anti-CD39 antibody to a subject having cancer at particular dosages disclosed herein, wherein the method further comprises administering a second therapy, wherein the second therapy is an antagonist of CD47. In some embodiments, methods are provided for treating cancer in a subject comprising administering an anti-CD39 antibody to a subject having cancer at particular dosages disclosed herein, wherein the method further comprises administering an antagonist of CD47 and a third therapy.

[0249] In some embodiments, methods are provided for inhibiting CD39 in tissue of a subject having cancer comprising administering an anti-CD39 antibody to a subject having cancer at particular dosages disclosed herein, wherein the administration reduces CD39 activity or total amount of CD39 in the tissue as compared to the activity or amount prior to administration, and wherein the method further comprises administering a second therapy, wherein the second therapy is an antagonist of CD47. In some embodiments, methods are provided for inhibiting CD39 in tissue of a subject having cancer comprising administering an anti-CD39 antibody to a subject having cancer at particular dosages disclosed herein, wherein the administration reduces CD39 activity or total amount of CD39 in the tissue as compared to the activity or amount prior to administration, and wherein the method further comprises administering an antagonist of CD47 and a third therapy.

[0250] In some embodiments, methods are provided for enhancing, increasing and/or sustaining an anti-tumor immune response in a subject comprising administering an anti-CD39 antibody to a subject having a tumor at particular dosages disclosed herein, wherein the method further comprises administering a second therapy, wherein the second therapy modulates IL-27 signaling. In some embodiments, methods are provided for enhancing, increasing and/or sustaining an anti-tumor immune response in a subject comprising administering an anti-CD39 antibody to a subject having a tumor at particular dosages disclosed herein, wherein the method further comprises administering an agent that modulates IL-27 signaling and a third therapy.

[0251] In some embodiments, methods are provided for treating cancer in a subject comprising administering an anti-CD39 antibody to a subject having cancer at particular dosages disclosed herein, wherein the method further comprises administering a second therapy, wherein the second therapy modulates IL-27 signaling. In some embodiments, methods are provided for treating cancer in a subject comprising administering an anti-CD39 antibody to a subject having cancer at particular dosages disclosed herein, wherein the method further comprises administering an agent that modulates IL-27 signaling and a third therapy.

[0252] In some embodiments, methods are provided for inhibiting CD39 in tissue of a subject having cancer comprising administering an anti-CD39 antibody to a subject having cancer at particular dosages disclosed herein, wherein the administration reduces CD39 activity or total amount of CD39 in the tissue as compared to the activity or amount prior to administration, and wherein the method further comprises administering a second therapy, wherein the second therapy modulates IL-27 signaling. In some embodiments, methods are provided for inhibiting CD39 in tissue of a subject having cancer comprising administering an anti-CD39 antibody to a subject having cancer at particular dosages disclosed herein, wherein the administration reduces CD39 activity or total amount of CD39 in the tissue as compared to the activity or amount prior to administration, and wherein the method further comprises administering an agent that modulates IL-27 signaling and a third therapy.

[0253] In some embodiments, methods are provided for enhancing, increasing and/or sustaining an anti-tumor immune response in a subject comprising administering an anti-CD39 antibody to a subject having a tumor at particular dosages disclosed herein, wherein the method further comprises administering a second therapy, wherein the second therapy is an antagonist of CTLA4. In some embodiments, methods are provided for enhancing, increasing and/or sustaining an anti-tumor immune response in a subject comprising administering an anti-CD39 antibody to a subject having a tumor at particular dosages disclosed herein, wherein the method further comprises administering an antagonist of CTLA4 and a third therapy.

[0254] In some embodiments, methods are provided for treating cancer in a subject comprising administering an anti-CD39 antibody to a subject having cancer at particular dosages disclosed herein, wherein the method further comprises administering a second therapy, wherein the second therapy is an antagonist of CTLA4. In some embodiments, methods are provided for treating cancer in a subject comprising administering an anti-CD39 antibody to a subject having cancer at particular dosages disclosed herein, wherein the method further comprises administering an antagonist of CTLA4 and a third therapy.

[0255] In some embodiments, methods are provided for inhibiting CD39 in tissue of a subject having cancer comprising administering an anti-CD39 antibody to a subject having cancer at particular dosages disclosed herein, wherein the administration reduces CD39 activity or total amount of CD39 in the tissue as compared to the activity or amount prior to administration, and wherein the method further comprises administering a second therapy, wherein the second therapy is an antagonist of CTLA4. In some embodiments, methods are provided for inhibiting CD39 in tissue of a subject having cancer comprising administering an anti-CD39 antibody to a subject having cancer at particular dosages disclosed herein, wherein the administration reduces CD39 activity or total amount of CD39 in the tissue as compared to the activity or amount prior to administration, and wherein the method further comprises administering an antagonist of CTLA4 and a third therapy.

[0256] In some embodiments, the additional therapeutic agent or second therapy or third therapy is a chemotherapeutic agent, an opsonizing agent, a regulatory T cell (“Treg”) depleting agent, an antagonist of a target other than CD39, or an agonist of a target other than CD39. In certain embodiments, the additional therapeutic agent or second therapy or third therapy is a chemotherapeutic agent described herein or any known chemotherapeutic agent. In some embodiments, the additional therapeutic agent or second therapy or third therapy is an opsonizing agent, wherein the opsonizing agent is an antibody other than an anti-CD39 antibody that targets cancer or tumor cells. In some embodiments, the additional therapeutic agent or second therapy or third therapy is a Treg depleting agent described herein or any known Treg depleting agent. In some embodiments, the additional therapeutic agent or second therapy or third therapy is an antagonist of a target other than CD39. In some embodiments, the additional therapeutic agent or second therapy or third therapy is an agonist of a target other than CD39.

[0257] In some instances, the additional therapeutic agent or second therapy or third therapy targets an independent inhibitory pathway, such as, for example, a pathway involving PD-1, PD-L1, CTLA-4, Lag-3, TIM-3, A2AR, A2BR, CD40, TIGIT, CD112R or CD73. In some embodiments, the additional therapeutic agent or second therapy or third therapy antagonizes one or more of PD-1, PD-L1, CTLA-4, Lag-3, TIM-3, A2AR, A2BR, CD40, TIGIT, CD112R or CD73. In some embodiments, the additional therapeutic agent or second therapy or third therapy is an agent targeting the adenosine axis. In some embodiments, the agent targeting the adenosine axis is a CD73 inhibitor. In some embodiments, the agent targeting the adenosine axis is an A2AR, A2BR or dual A2AR/A2BR antagonist. Suitable antagonists for use in the combination therapy described herein, include, without limitation, ligands, antibodies (e.g., monoclonal antibodies and bispecific antibodies), and multivalent agents. In one embodiment, the antagonist is a fusion protein, e.g., an Fc fusion protein, such as AMP-244. In some embodiments, the PD-1 or PD-L1 antagonist is an anti-PD-1 or anti-PD-L1 antibody.

[0258] In some embodiments, the methods further comprise administering a second therapy, wherein the second therapy is administration of an antagonist of PD-1 or PD-L1 (e.g., anti-PD-1 or anti-PD-L1 antibody). In some embodiments, the methods result in an increase in interferon gamma (IFN-γ) response in the tumor microenvironment. In some embodiments, the increase in IFN-γ response is greater than the IFN-γ response from administration of the antagonist of PD-1 or PD-L1 alone. In some embodiments, the increase in IFN-γ response is greater than the IFN-γ response from a subject that has not received administration of the antagonist of PD-1 or PD-L1. In some embodiments, the increase in IFN-γ response is upregulation of interferon gamma (IFN-γ)-related genes in tumor-associated macrophages in the tumor microenvironment. In some embodiments, the increase in IFN-γ response is an increase in IFN-γ protein amount in the tumor microenvironment. In some embodiments, the increase in IFN-γ response is an increase in IFN-γ gene expression in cells isolated from the tumor microenvironment.

[0259] In some embodiments, the methods for treating a subject having cancer with an anti-CD39 antibody at particular dosages disclosed herein and an antagonist of PD-1 or PD-L1 (e.g., anti-PD-1 or anti-PD-L1 antibody) result in infiltration of innate immune cells into the tumor microenvironment. In some embodiments, the infiltration of innate immune cells is greater than the infiltration of innate immune cells from administration of the antagonist of PD-1 or PD-L1 alone. In some embodiments, the infiltration of innate immune cells is greater than the infiltration of innate immune cells from a subject that has not received administration of the antagonist of PD-1 or PD-L1. In some embodiments, the innate immune cells are myeloid cells. In some embodiments, the innate immune cells are tumor-associated macrophages. In some embodiments, the tumor-associated macrophages are positive for expression the F4/80 antigen. In some embodiments, the innate immune cells are NK cells.

[0260] An exemplary anti-PD-1 antibody is nivolumab (BMS-936558) or an antibody that comprises the CDRs or variable regions of one of antibodies 17D8, 2D3, 4H1, 5C4, 7D3, 5F4 and 4A11 described in WO 2006/121168. In certain embodiments, an anti-PD-1 antibody is AMP-514 described in WO 2012/145493; PDR001; BGB-A317 (tislelizumab) and BGB-108; 244C8 and 388D4 as described in WO2016106159; REGN2810; pidilizumab; TSR-042; PF-06801591; or AMP-224. Further known PD-1 antibodies and other PD-1 inhibitors include those described in WO 2009/014708, WO 03/099196, WO 2009/114335, WO 2011/066389, WO 2011/161699, WO 2012/145493, U.S. Pat. Nos. 7,635,757 and 8,217,149, and U.S. Patent Publication No. 2009/0317368. Any of the anti-PD-1 antibodies disclosed in WO2013/173223 can also be used. An anti-PD-1 antibody that competes for binding with, and/or binds to the same epitope on PD-1 as, as one of these antibodies can also be used in combination treatments.

[0261] In some embodiments, the anti-PD-L1 antibody useful for the combination therapy is BMS-936559 (referred to as 12A4 in WO 2007/005874 and U.S. Pat. No. 7,943,743), or an antibody that comprises the CDRs or variable regions of 3G10, 12A4, 10A5, 5F8, 10H10, 1B12, 7H1, 11E6, 12B7 and 13G4, which are described in PCT Publication WO 07/005874 and U.S. Pat. No. 7,943,743. In certain embodiment an anti-PD-L1 antibody is MED14736 (also known as durvalumab and Anti-B7-H1), MPDL3280A (also known as atezolizumab and RG7446), MSB0010718C (also known as avelumab; WO2013/79174), FAZ053, MDX1105, or rHigM12B7. Any of the anti-PD-L1 antibodies disclosed in WO2013/173223, WO2011/066389, WO2012/145493, U.S. Pat. Nos. 7,635,757 and 8,217,149 and U.S. Publication No. 2009/145493 can also be used. Anti-PD-L1 antibodies that compete with and/or bind to the same epitope as that of any of these antibodies can also be used in combination treatments.

[0262] In some embodiments of the method of treating cancer involving administering a second therapy, the second therapy is an antagonist of PD-1. In some embodiments of the method of treating cancer involving administering a second therapy, the second therapy is an antagonist of PD-L1. In some embodiments, the antagonist of PD-1 is an anti-PD-1 antibody. In some embodiments, the antagonist of PD-L1 is an anti-PD-L1 antibody. In some embodiments, the antagonist of PD-1 is administered to the subject by intravenous administration. In some embodiments, the anti-CD39 antibody and the antagonist of PD-1 are administered sequentially. In some embodiments, the antagonist of PD-1 is administered before the anti-CD39 antibody is administered.

[0263] In some embodiments of the method of treating cancer, the method further comprises administering two additional therapies. In some embodiments the two additional therapies comprise a chemotherapeutic agent and an antagonist of PD-1 or an antagonist of PD-L1. In some embodiments, the two additional therapies comprise a chemotherapeutic agent and an agent targeting the adenosine axis. In some embodiments, the two additional therapies comprise an antagonist of PD-1 or an antagonist of PD-L1 and an agent targeting the adenosine axis.

[0264] In some embodiments, methods of treating cancer in a subject in need thereof are provided comprising administering an anti-CD39 antibody comprising disclosed herein, wherein the antibody is administered at a dose of 20, 70, 200, 700, 1400, or 2000 mg, and wherein the method further comprises administering a second therapy. In some embodiments, the second therapy is a chemotherapeutic agent. In some embodiments, the second therapy is gemcitabine. In some embodiments, the second therapy is albumin-bound paclitaxel. In some embodiments, the second therapy is an antagonist of PD-1. In some embodiments, the second therapy is an anti-PD-1 antibody. In some embodiments, the anti-CD39 antibody is administered intravenously. In some embodiments, the anti-CD39 antibody is administered once every 1, 2, 3, 4, 5 or 6 weeks. In some embodiments, the anti-CD39 antibody is administered once every 2 weeks.

[0265] In some embodiments, methods of treating cancer in a subject in need thereof are provided comprising administering an anti-CD39 antibody disclosed herein, wherein the antibody is administered at a fixed or flat dose, and wherein the method further comprises administering an anti-PD-1 antibody. In some embodiments, methods of treating cancer in a subject in need thereof are provided comprising administering an anti-CD39 antibody disclosed herein, wherein the antibody is administered at a dose of 20, 70, 200, 700, 1400, or 2000 mg, and wherein the method further comprises administering an anti-PD-1 antibody. In some embodiments, a method of treating cancer in a subject in need thereof are provided comprising administering an anti-CD39 antibody comprising:
[0266] g) HCDR1 comprising the amino acid sequence of SEQ ID NO: 30001;
[0267] h) HCDR2 comprising the amino acid sequence of SEQ ID NO: 30002;
[0268] i) HCDR3 comprising the amino acid sequence of SEQ ID NO: 30003;
[0269] j) LCDR1 comprising the amino acid sequence of SEQ ID NO: 30004;
[0270] k) LCDR2 comprising the amino acid sequence of SEQ ID NO: 30005; and
[0271] 1) LCDR3 comprising the amino acid sequence of SEQ ID NO: 30006;
   wherein the antibody is administered at a dose of 20, 70, 200, 700, 1400, or 2000 mg, and wherein the method further comprises administering an anti-PD-1 antibody. In some embodiments, the anti-CD39 antibody is administered intravenously. In some embodiments, the anti-CD39 antibody is administered once every 1, 2, 3, 4, 5 or 6 weeks. In some embodiments, the anti-CD39 antibody is administered once every 2 weeks. In some embodiments, the anti-CD39 antibody and anti-PD-1 antibody are administered sequentially. In some embodiments, the anti-PD-1 antibody is administered before the anti-CD39 antibody is administered.

[0272] In some embodiments, methods of treating cancer in a subject in need thereof are provided comprising administering an anti-CD39 antibody comprising disclosed herein, wherein the antibody is administered at a fixed or flat dose, and wherein the method further comprises administering gemcitabine and albumin-bound paclitaxel. at a fixed or flat dose. In some embodiments, methods of treating cancer in a subject in need thereof are provided comprising administering an anti-CD39 antibody comprising disclosed herein, wherein the antibody is administered at a dose of 20, 70, 200, 700, 1400, or 2000 mg, and wherein the method further comprises administering gemcitabine and albumin-bound paclitaxel. In some embodiments, a method of treating cancer in a subject in need thereof are provided comprising administering an anti-CD39 antibody comprising:
[0273] a) HCDR1 comprising the amino acid sequence of SEQ ID NO: 30001;
[0274] b) HCDR2 comprising the amino acid sequence of SEQ ID NO: 30002;
[0275] c) HCDR3 comprising the amino acid sequence of SEQ ID NO: 30003;
[0276] d) LCDR1 comprising the amino acid sequence of SEQ ID NO: 30004;
[0277] e) LCDR2 comprising the amino acid sequence of SEQ ID NO: 30005; and
[0278] f) LCDR3 comprising the amino acid sequence of SEQ ID NO: 30006;
   wherein the antibody is administered at a dose of 20, 70, 200, 700, 1400, or 2000 mg, and wherein the method further comprises administering gemcitabine and albumin-bound paclitaxel. In some embodiments, the albumin-bound paclitaxel is administered at a dose of 125 mg/m² on days 1, 8, and 15 of a 28-day cycle. In some embodiments, the albumin-bound paclitaxel is administered to the subject by intravenous administration. In some embodiments, the gemcitabine is administered at a dose of 1000 mg/m² on days 1, 8, and 15 of a 28-day cycle. In some embodiments, the gemcitabine is administered to the subject by intravenous administration. In some embodiments, the anti-CD39 antibody is administered intravenously. In some embodiments, the anti-CD39 antibody is administered once every 1, 2, 3, 4, 5 or 6 weeks. In some embodiments, the anti-CD39 antibody is administered once every 2 weeks. In some embodiments, the anti-CD39 antibody, albumin-bound paclitaxel, and gemcitabine are administered sequentially. In some embodiments, the anti-CD39 antibody is administered before albumin-bound paclitaxel and gemcitabine are administered.

[0279] In certain embodiments, the methods may comprise administering an anti-CD39 antibody in combination with a CTLA-4 antagonist, e.g., an anti-CTLA-4 antibody. In one embodiment, an anti-CTLA-4 antibody is an antibody selected from the group of: Yervoy® (ipilimumab or antibody 10D1, described in PCT Publication WO 01/14424), tremelimumab (formerly ticilimumab, CP-675,206), monoclonal or an anti-CTLA-4 antibody described in any of the following publications: WO 98/42752; WO 00/37504; U.S. Pat. No. 6,207,156; Hurwitz et al. (1998) Pro. Natl. Acad. Sci. USA 95(17): 10067-10071; Camacho et al. (2004) J. Clin. Oncology 22(145): antibodies tract No. 2505 (antibody CP-675206); and Mokyr et al. (1998) Cancer Res. 58:5301-5304. Any of the anti-CTLA-4 antibodies disclosed in WO2013/173223 can also be used.

[0280] In some embodiments, the methods may comprise administering an anti-CD39 antibody in combination with a LAG-3 (also referred to herein and by others as LAG3) antagonist. In some embodiments, the LAG-3 inhibitor is selected from the group consisting of LAG525, BMS-986016, and TSR-033. Examples of anti-LAG3 antibodies include antibodies comprising the CDRs or variable regions of antibodies 25F7, 26H10, 25E3, 8B7, 11F2 or 17E5, which are described in U.S. Patent Publication No. US2011/0150892, WO10/19570 and WO2014/008218. In one embodiment, an anti-LAG-3 antibody is BMS-986016. Other art recognized anti-LAG-3 antibodies that can be used include IMP731 and IMP-321, described in US 2011/007023, WO08/132601, and WO09/44273. Anti-LAG-3 antibodies that compete with and/or bind to the same epitope as that of any of these antibodies can also be used in combination treatments.

[0281] In some embodiments, the methods may comprise administering an anti-CD39 antibody in combination with an adenosine A2AR antagonist, A2BR antagonist or dual A2AR/A2BR antagonists. Examples of A2AR, A2BR and dual A2AR/A2BR antagonists include Preladenant/SCH 420814 (Merck/Schering, CAS Registry Number: 377727-87-2), which is described in Hodgson et al., (2009) J Pharmacol Exp Ther 330(1):294-303 and incorporated herein by reference in its entirety; ST-4206 (Leadiant Biosciences), which is described in U.S. Pat. No. 9,133,197 and incorporated herein by reference in its entirety; KW-6356 (Kyowa Hakko Kogyo), Tozadenant/SYN-115 (Acorda), Istradefylline/KW-6002 (Kyowa Hakko Kogyo, CAS Registry Number: 155270-99-8), which is described in LeWitt et al., (2008) Ann Neurol 63(3):295-302 and is incorporated herein by reference in its entirety; theophylline (CAS Registry Number: 58-55-9), NIR178 (Novartis); GBV-2034 (Globavir), Vipadenant (Redox/Juno), AZD4635/HTL-1071 (AstraZeneca/Heptares), which is described in WO2011/095625 and is incorporated herein by reference in its entirety; CPI-444/V81444 (Corvus/Genentech), which is described in WO 2009/156737 and is incorporated herein by reference in its entirety; PBF509 (Palobiofarma/Novartis), which is described in U.S. Pat. No. 8,796,284 and WO 2017/025918 and are incorporated herein by reference in their entirety; A2AR antagonists described in U.S. Pat. Nos. 8,114,845, 9,029,393, US20170015758, or US20160129108, all of which are incorporated herein by reference in their entirety; and ATL-444, MSX-3, SCH-58261, SCH-412,348, SCH-442,416, VER-6623, VER-6947, VER-7835, CGS-15943, or ZM-241,385.

[0282] In some embodiments, the methods may comprise administering an anti-CD39 antibody in combination with an adenosine A2BR antagonist. In some embodiments, the methods may comprise administering an anti-CD39 antibody in combination with a dual A2AR/A2BR antagonist.

[0283] In some embodiments, the methods may comprise administering an anti-CD39 antibody in combination with a CD40 inhibitor.

[0284] In some embodiments, the methods may comprise administering an anti-CD39 antibody in combination with an agent targeting the adenosine axis (e.g., a CD73 inhibitor or a A2AR/A2BR antagonist).

[0285] In some embodiments, the methods may comprise administering an anti-CD39 antibody in combination with a CD73 inhibitor. Examples of CD73 inhibitors include small molecule CD73 inhibitors such as AB421 (Arcus), a CD73 antibody, or antigen binding portion thereof, that binds to CD73 such as MED19447 (Medimmune), BMS-986179 (Bristol Meyers Squibb), or such as described in US2018/0009899 (Corvus), which is incorporated herein by reference in its entirety.

[0286] In some embodiments, the methods may comprise administering an anti-CD39 antibody in combination with a TIM-3 inhibitor. Examples of TIM-3 inhibitors include MGB453 (Novartis), TSR-022 (Tesaro), or LY3321367 (Eli Lilly). Suitable antagonists for use in the combination therapy described herein, include, without limitation, ligands, antibodies (e.g., monoclonal antibodies and bispecific antibodies), and multivalent agents.

[0287] In some embodiments, the one or more additional therapeutic agents is a chimeric antigen receptor (CAR) cell therapy. In some embodiments, the CAR cell therapy is CTL019.

[0288] In some embodiments, members of the PVR gene family are upregulated on tumor cells and can exhibit intrinsic tumor-promoting properties. Therefore, in some embodiments, the second therapy is selected from one or more of an antagonist of TIGIT, CD112R, CD96, PVRL1, PVRL2, PVRL3, PVRL4, and CD155. Suitable antagonists for use in the combination therapy described herein, include, without limitation, ligands, antibodies (e.g., monoclonal antibodies and bispecific antibodies), and multivalent agents.

[0289] STING agonists induce innate immune cell activation resulting in increased T cell priming and recruitment of immune cells into the tumor microenvironment. Targeting STING agonists in combination with CD39 has the potential to lead to an even further increase in T cell and NK cell recruitment and activation.

[0290] Increased anti-CD47 antibody mediated phagocytosis can lead to an increase in the presentation of cancer derived antigens by macrophages to T cells. Combination treatment with an anti-CD47 antibody and an anti-CD39 antibody, such as an anti-CD39 antibody provided herein provides an opportunity to enhance cancer antigen specific T cell responses and is fully encompassed herein.

[0291] In some embodiments, the additional therapeutic agent or second therapy or third therapy is an antagonist of CD47. In some embodiments, the antagonist of CD47 is an anti-CD47 antibody. See U.S. Pat. No. 9,803,016 (e.g., SEQ Id NOs: 24 and 26), herein incorporated in its entirety by reference.

[0292] Any of the therapies listed above for use in combination with an anti-CD39 antibody at fixed doses may be used alone with the anti-CD39 antibody or together with any of the other named non-anti-CD39 therapy.

[0293] The methods disclosed herein may also be provided before, substantially contemporaneous with, or after other therapies, for example, surgery, chemotherapy, radiation therapy, or the administration of a biologic, such as another therapeutic antibody. In some embodiments where e.g., two therapies are administered or a triple-combination of cancer therapies is administered, the therapies may be administered concurrently, consecutively, and/or at different points in time according to their own dosing schedule. In some embodiments, the cancer has recurred or progressed following a therapy selected from surgery, chemotherapy, and radiation therapy, or a combination thereof. For example, the methods described herein could be provided as adjunctive therapy when there is a risk that micrometastases can be present and/or in order to reduce the risk of a relapse.

[0294] In some embodiments, the methods provided herein comprise administering a anti-CD39 antibody at particular doses and dosages disclosed herein and a chemotherapeutic agent. Exemplary chemotherapeutic agents include, but are not limited to, anthracyclines (e.g., doxorubicin, idarubicin, daunorubicin, cytarabine, epirubicin, valrubicin and mitoxantrone) (see e.g., Minotti et al., (2004) Pharmacol Rev 56(2):185-229), topoisomerase inhibitors (e.g., topotecan; Hycamtin, camptothecin, etoposide) (see e.g., Pommier et al., (2010) Chem Biol 17(5):421-433; which is incorporated herein by reference in its entirety), bleomycin (Kimura et al., (1972) Cancer 29(1):58-60), gemcitabine (Plunkett et al., (1995) Semin Oncol 22(4 Suppl 11):3-10), platins (e.g., carboplatin, cisplatin, oxaliplatin, satraplatin, picoplatin) (Kelland (2007) Nat Rev Cancer 7(8):573-584), taxanes (e.g., docetaxel, paclitaxel, abraxane) (Abal et al., (2003) Curr Cancer Drug Targets 3(3):193-203) (including albumin-bound versions of taxanes (e.g., albumin-bound paclitaxel), DNA alkylating agents (eg. cyclophosphamide, bendamustine) (Leoni et al., (2008) Clin Cancer Res 14(1):309-317), CHOP (drug combination of cyclophosphamide, doxorubicin hydrochloride, vincristine and prednisone) (Dunleavy (2014) Hematology Am Soc Hematol Educ Program 2014(1):107-112), and fluorouracil and derivatives thereof (Alvarez et al., (2012) Expert Opin Ther Pat 22(2):107-123, which is incorporated herein by reference in its entirety).

[0295] In some embodiments, the methods provided herein comprise administering a anti-CD39 antibody at particular doses and dosages disclosed herein and a combination of chemotherapeutic agents. Exemplary combinations of chemotherapeutic agents (or “chemotherapeutic regimens”) include gemcitabine and paclitaxel (including albumin-bound paclitaxel); flouracil and leucovorin (the “FL” chemotherapeutic regimen); leucovorin, fluorouracil and oxaliplatin (the “FOLFOX” chemotherapeutic regimen); leucovorin, fluorouracil, and irinotecan (the “FOLFIRI” chemotherapeutic regimen); leucovorin, fluorouracil, irinotecan and oxaliplatin (the “FOLFIRIFOX” chemotherapeutic regimen); irinotecan, leucovorin, and fluorouracil (the “IFL” chemotherapeutic regimen); and capecitabine and oxaliplatin (the “CAPOX” chemotherapeutic regimen).

[0296] In some embodiments, the chemotherapeutic agent is used in combination with the anti-CD39 antibody is gemcitabine and albumin-bound paclitaxel. In some embodiments, the albumin-bound paclitaxel is administered at a dose of 125 mg/m² on days 1, 8, and 15 of a 28-day cycle. In some embodiments, albumin-bound paclitaxel is administered to the subject by intravenous administration. In some embodiments, gemcitabine is administered at a dose of 1000 mg/m² on days 1, 8, and 15 of a 28-day cycle. In some embodiments, gemcitabine is administered to the subject by intravenous administration. In some embodiments, the anti-CD39 antibody, albumin-bound paclitaxel, and gemcitabine are administered sequentially. In some embodiments, the anti-CD39 antibody is administered before albumin-bound paclitaxel and gemcitabine are administered.

[0297] In some embodiments, the chemotherapeutic agent induces immunogenic cell death (ICD). In some embodiments, the agent that induces ICD is an anthracycline. In some embodiments, the anthracycline is selected from doxorubicin, daunorubicin, epirubicin, idarubicin, and valrubicin. In some embodiments, the anthracycline is doxorubicin. In some embodiments, the agent that induces ICD is a platinum derivative. In some embodiments, the platinum derivative is selected from oxaliplatin, carboplatin, and cisplatin. In some embodiments, the platinum derivative is oxaliplatin.

[0298] Other chemotherapeutic agents suitable for combination and/or co-administration in the disclosed methods include, for example: taxol, cytochalasin B, gramicidin D, ethidium bromide, emetine, mitomycin, etoposide, tenoposide, vincristine, vinblastine, colchicine, doxorubicin, daunorubicin, dihydroxyanthrancindione, mitoxantrone, mithramycin, actinomycin D, 1-dehydrotestosterone, glucocorticoids, procaine, tetracaine, lidocaine, propranolol, and puromycin and analogs or homologs thereof. Further agents include, for example, antimetabolites (e.g., methotrexate, 6-mercaptopurine, 6-thioguanine, cytarabine, 5-fluorourac49acarbazineine), alkylating agents (e.g. mechlorethamine, thioTEPA, chlorambucil, melphalan, carmustine (BSNU), lomustine (CCNU), cyclophosphamide, busulfan, dibromomannitol, streptozotocin, mitomycin C, cis-dichlordiamine platinum (II)(DDP), procarbazine, altretamine, cisplatin, carboplatin, oxaliplatin, nedaplatin, satraplatin, or triplatin tetranitrate), anthracycline (e.g. daunorubicin (formerly daunomycin) and doxorubicin), antibiotics (e.g. dactinomcin (formerly actinomycin), bleomycin, mithramycin, and anthramycin (AMC)), and anti-mitotic agents (e.g. vincristine and vinblastine) and temozolomide.

[0299] In some embodiments the methods provided herein comprise administering a anti-CD39 antibody at particular dosages disclosed herein in conjunction with radiation therapy.

[0300] For treatment of cancer, the combinations may be administered in conjunction with one or more additional anti-cancer agents, such as a chemotherapeutic agent, growth inhibitory agent, a tyrosine kinase inhibitor, anti-cancer vaccine such as a gene therapy vaccine, anti-angiogenesis agent and/or anti-neoplastic composition or in conjunction with radiation therapy.

[0301] In some embodiments, an anti-inflammatory drug may be administered with the combination, such as a steroid or a non-steroidal anti-inflammatory drug (NSAID). In cases where it is desirable to render aberrantly proliferative cells quiescent in conjunction with or prior to treatment with CD39 antibodies described herein, hormones, antiandrogens and steroids (including synthetic analogs), such as 17a-Ethinylestradiol, Diethylstilbestrol, Testosterone, Prednisone, Fluoxymesterone, Dromostanolone propionate, Testolactone, Megestrolacetate, Methylprednisolone, Methyl-testosterone, Prednisolone, Triamcinolone, Chlorotrianisene, Hydroxyprogesterone, Aminoglutethimide, Estramustine, Medroxyprogesteroneacetate, Leuprolide, Flutamide, Toremifene, ZOLADEX®, enzalutamide, apalutamide, abiraterone acetate, bicalutamide, cyproterone acetate, can also be administered to the subject. When employing the methods or compositions described herein, other agents used in the modulation of tumor growth or metastasis in a clinical setting, such as antimimetics, can also be administered as desired.

[0302] Such combination therapies noted above encompass combined administration (where two or three or more therapeutic agents are included in the same or separate formulations or compositions), and separate administration, in which case, administration of the anti-CD39 antibody can occur prior to, simultaneously, and/or following, administration of the additional therapeutic agent or agents. In some embodiments, administration of the anti-CD39 antibody and administration of an additional therapeutic agent occur within about one month, or within about one, two or three weeks, or within about one, two, three, four, five, or six days, of each other.

[0303] The anti-CD39 antibody (and any additional therapeutic agent) can be administered by any suitable means, including parenteral, intrapulmonary, and intranasal, and, if desired for local treatment, intralesional administration. Parenteral infusions include intramuscular, intravenous, intraarterial, or intraperitonealadministration. Dosages may be administered by any suitable route, e.g. by injections, such as intravenous injections, depending in part on whether the administration is brief or chronic. Various dosages including but not limited to single or multiple administrations over various time-points, bolus administration, and pulse infusion are contemplated herein. In some embodiments of the methods of treating cancer disclosed herein, the anti-CD39 antibody is administered intravenously.

[0304] The following additional embodiments are encompassed in their entirety.

[0305] Embodiment 1. A method of treating cancer in a human subject in need thereof comprising administering a pharmaceutical composition comprising an anti-CD39 antibody, wherein the antibody is administered at a dose of 20, 70, 200, 700, 1400, or 2000 mg.

[0306] Embodiment 2. The method of embodiment 1, wherein the anti-CD39 antibody comprises:
[0307] i) HCDR1 comprising the amino acid sequence of SEQ ID NO: 30001;
[0308] ii) HCDR2 comprising the amino acid sequence of SEQ ID NO: 30002;
[0309] iii) HCDR3 comprising the amino acid sequence of SEQ ID NO: 30003;
[0310] iv) LCDR1 comprising the amino acid sequence of SEQ ID NO: 30004;
[0311] v) LCDR2 comprising the amino acid sequence of SEQ ID NO: 30005; and
[0312] vi) LCDR3 comprising the amino acid sequence of SEQ ID NO: 30006.

[0313] Embodiment 3. The method of embodiment 1, wherein the antibody is administered intravenously.

[0314] Embodiment 4. The method of embodiment 1 or embodiment 2, wherein the antibody is administered once every 1, 2, 3, 4, 5 or 6 weeks.

[0315] Embodiment 5. The method of any one of embodiments 1-3, wherein the antibody is administered once every 2 weeks.

[0316] Embodiment 6. The method of any one of the preceding embodiments, wherein the antibody comprises a heavy chain variable region (VH) and a light chain variable region (VL), wherein the VH is at least 90%, 91%, 92%, 93%, 94%, 95%, 96%, 97%, 98%, 99%, or 100% identical to the amino acid sequence of SEQ ID NO: 30012 and the VL is at least 90%, 91%, 92%, 93%, 94%, 95%, 96%, 97%, 98%, 99%, or 100% identical to the amino acid sequence of SEQ ID NO: 30018.

[0317] Embodiment 7. The method of any one of the preceding embodiments, wherein the VH comprises the amino acid sequence of SEQ ID NO: 30012 and the VL comprises the amino acid sequence of SEQ ID NO: 30018.

[0318] Embodiment 8. The method of any one of the preceding embodiments, wherein the antibody is a full-length antibody.

[0319] Embodiment 9. The method of any one of the preceding embodiments, wherein the antibody comprises a fully human immunoglobulin G4 (IgG4) antibody.

[0320] Embodiment 10. A pharmaceutical composition comprising an anti-CD39 antibody and a pharmaceutically acceptable carrier, wherein the anti-CD39 antibody is formulated for administration at a dose of 20, 70, 200, 700, 1400, or 2000 mg.

[0321] Embodiment 11. The pharmaceutical composition of embodiment 10, wherein the anti-CD39 antibody comprises:
[0322] i) six CDRs comprising:
   [0323] i. HCDR1 comprising the amino acid sequence of SEQ ID NO: 30001;
   [0324] ii. HCDR2 comprising the amino acid sequence of SEQ ID NO: 30002;
   [0325] iii. HCDR3 comprising the amino acid sequence of SEQ ID NO: 30003;
   [0326] iv. LCDR1 comprising the amino acid sequence of SEQ ID NO: 30004;
   [0327] v. LCDR2 comprising the amino acid sequence of SEQ ID NO: 30005; and
   [0328] vi. LCDR3 comprising the amino acid sequence of SEQ ID NO: 30006; or
[0329] ii) a VH comprising the amino acid sequence of SEQ ID NO: 30012 and a VL comprising the amino acid sequence of SEQ ID NO: 30018.

[0330] Embodiment 12. The pharmaceutical composition of embodiment 10 or embodiment 11 for use in treating cancer in a human subject in need thereof.

[0331] Embodiment 13. The pharmaceutical composition for use of embodiment 12, wherein the anti-CD39 antibody is administered intravenously.

[0332] Embodiment 14. The pharmaceutical composition for use of embodiment 12 or embodiment 13, wherein the anti-CD39 antibody is administered once every 1, 2, 3, 4, 5 or 6 weeks.

[0333] Embodiment 15. The pharmaceutical composition for use of any one of embodiments 12-14, wherein the anti-CD39 antibody is administered once every two weeks.

[0334] Embodiment 16. The method or pharmaceutical composition for use of any one of the preceding embodiments, wherein the cancer is newly diagnosed or non-metastatic.

[0335] Embodiment 17. The method or pharmaceutical composition for use of any one of the preceding embodiments, wherein the cancer is advanced.

[0336] Embodiment 18. The method or pharmaceutical composition for use of any one of the preceding embodiments, wherein the cancer is refractory.

[0337] Embodiment 19. The method or pharmaceutical composition for use of any one of the preceding embodiments, wherein the cancer is metastatic.

[0338] Embodiment 20. The method or pharmaceutical composition for use of any one of the preceding embodiments, wherein the cancer is a solid tumor.

[0339] Embodiment 21. The method or pharmaceutical composition for use of any one of the preceding embodiments, wherein the cancer is an advanced solid tumor.

[0340] Embodiment 22. The method or pharmaceutical composition for use of any one of the preceding embodiments, wherein the cancer is a relapsed solid tumor.

[0341] Embodiment 23. The method or pharmaceutical composition for use of any one of the preceding embodiments, wherein the cancer is a refractory solid tumor.

[0342] Embodiment 24. The method or pharmaceutical composition for use of any one of the preceding embodiments, wherein the cancer is a metastatic solid tumor.

[0343] Embodiment 25. The method or pharmaceutical composition for use of any one of the preceding embodiments, wherein the cancer is carcinoma, lymphoma, blastoma, sarcoma, or leukemia.

[0344] Embodiment 26. The method or pharmaceutical composition for use of any one of the preceding embodiments, wherein the cancer is pancreatic cancer.

[0345] Embodiment 27. The method or pharmaceutical composition for use of any one of the preceding embodiments, wherein the cancer is gastric cancer.

[0346] Embodiment 28. The method or pharmaceutical composition for use of any one of the preceding embodiments, wherein the cancer is prostate cancer.

[0347] Embodiment 29. The method or pharmaceutical composition for use of any one of the preceding embodiments, wherein the cancer is endometrial cancer.

[0348] Embodiment 30. The method or pharmaceutical composition for use of any one of the preceding embodiments, wherein the cancer is non-small cell lung cancer.

[0349] Embodiment 31. The method or pharmaceutical composition for use of any one of the preceding embodiments, wherein the cancer is colorectal cancer.

[0350] Embodiment 32. The method or pharmaceutical composition for use of any one of the preceding embodiments, wherein the cancer is ovarian cancer.

[0351] Embodiment 33. The method or pharmaceutical composition for use of any one of the preceding embodiments, wherein the cancer is squamous cell cancer, small-cell lung cancer, pituitary cancer, esophageal cancer, astrocytoma, soft tissue sarcoma, non-small cell lung cancer (including squamous cell non-small cell lung cancer), adenocarcinoma of the lung, squamous carcinoma of the lung, cancer of the peritoneum, hepatocellular cancer, gastrointestinal cancer, pancreatic cancer, glioblastoma, cervical cancer, ovarian cancer, liver cancer, bladder cancer, hepatoma, breast cancer, colon cancer, colorectal cancer, endometrial or uterine carcinoma, salivary gland carcinoma, kidney cancer, renal cell carcinoma, liver cancer, prostate cancer, vulval cancer, thyroid cancer, hepatic carcinoma, brain cancer, endometrial cancer, testis cancer, cholangiocarcinoma, gallbladder carcinoma, gastric cancer, melanoma, or various types of head and neck cancer (including squamous cell carcinoma of the head and neck).

[0352] Embodiment 34. The method or pharmaceutical composition for use of any one of the preceding embodiments, wherein the method or use further comprises administering a second therapy.

[0353] Embodiment 35. The method or pharmaceutical composition for use of embodiment 34, wherein the second therapy is a chemotherapeutic agent.

[0354] Embodiment 36. The method or pharmaceutical composition for use of embodiment 34 or embodiment 35, wherein the second therapy is gemcitabine.

[0355] Embodiment 37. The method or pharmaceutical composition for use of embodiment 34 or embodiment 35, wherein the second therapy is albumin-bound paclitaxel.

[0356] Embodiment 38. The method or pharmaceutical composition for use of embodiment 34 or embodiment 35, wherein the second therapy is an antagonist of PD-1 or PD-Li.

[0357] Embodiment 39. The method or pharmaceutical composition for use of embodiment 34, wherein the second therapy is an anti-PD-1 antibody.

[0358] Embodiment 40. The method or pharmaceutical composition for use of any one of embodiments 1-9 or 12-33, wherein the method or use further comprises administering two additional therapies.

[0359] Embodiment 41. The method or pharmaceutical composition for use of embodiment 40, wherein the two additional therapies comprise a chemotherapeutic agent and an antagonist of PD-1 or an antagonist of PD-L1.

[0360] Embodiment 42. The method or pharmaceutical composition for use of embodiment 40, wherein the two additional therapies comprise a chemotherapeutic agent and an agent targeting the adenosine axis.

[0361] Embodiment 43. The method or pharmaceutical composition for use of embodiment 40, wherein the two additional therapies comprise an antagonist of PD-1 or an antagonist of PD-L1 and an agent targeting the adenosine axis.

[0362] Embodiment 44. The method or pharmaceutical composition for use of embodiment 40, wherein one of the two additional therapies comprise an A2AR antagonist, an A2BR antagonist, or a dual A2AR/A2B antagonist.

[0363] Embodiment 45. The method or pharmaceutical composition for use of embodiment 40, wherein the two additional therapies comprise at least one chemotherapeutic agent.

[0364] Embodiment 46. The method or pharmaceutical composition for use of embodiment 40, wherein the two additional therapies comprise two chemotherapeutic agents.

[0365] Embodiment 47. The method or pharmaceutical composition for use of embodiment 45 or embodiment 46, wherein one of the two additional therapies is gemcitabine.

[0366] Embodiment 48. The method or pharmaceutical composition for use of embodiment 45 or embodiment 46, wherein one of the two additional therapies is albumin-bound paclitaxel.

[0367] Embodiment 49. The method or pharmaceutical composition for use of any one of embodiments 40, or 45-48, wherein the two additional therapies comprise gemcitabine and albumin-bound paclitaxel.

[0368] Embodiment 50. The method or pharmaceutical composition for use of any one of embodiments 37, or 48-49, wherein albumin-bound paclitaxel is administered at a dose of 125 mg/m2 on days 1, 8, and 15 of a 28-day cycle.

[0369] Embodiment 51. The method or pharmaceutical composition for use of any one of embodiments 37, or 48-50, wherein albumin-bound paclitaxel is administered to the subject by intravenous administration.

[0370] Embodiment 52. The method or pharmaceutical composition for use of any one of embodiments 36, 47, or 49, wherein gemcitabine is administered at a dose of 1000 mg/m2 on days 1, 8, and 15 of a 28-day cycle.

[0371] Embodiment 53. The method or pharmaceutical composition for use of any one of embodiments 36, 47, 49, or 52, wherein gemcitabine is administered to the subject by intravenous administration.

[0372] Embodiment 54. The method or pharmaceutical composition for use of any one of embodiments 49-53, wherein the anti-CD39 antibody, albumin-bound paclitaxel, and gemcitabine are administered sequentially.

[0373] Embodiment 55. The method or pharmaceutical composition for use of embodiment 54, wherein the anti-CD39 antibody is administered before albumin-bound paclitaxel and gemcitabine are administered.

[0374] Embodiment 56. A method of treating cancer in a human subject in need thereof comprising administering an anti-CD39 antibody comprising a VH comprising the amino acid sequence of SEQ ID NO: 30012 and a VL comprising the amino acid sequence of SEQ ID NO: 30018, wherein the antibody is administered at a dose of 20 mg intravenously every 2 weeks.

[0375] Embodiment 57. A method of treating cancer in a human subject in need thereof comprising administering an anti-CD39 antibody comprising a VH comprising the amino acid sequence of SEQ ID NO: 30012 and a VL comprising the amino acid sequence of SEQ ID NO: 30018, wherein the antibody is administered at a dose of 70 mg intravenously every 2 weeks.

[0376] Embodiment 58. A method of treating cancer in a human subject in need thereof comprising administering an anti-CD39 antibody comprising a VH comprising the amino acid sequence of SEQ ID NO: 30012 and a VL comprising the amino acid sequence of SEQ ID NO: 30018, wherein the antibody is administered at a dose of 200 mg intravenously every 2 weeks.

[0377] Embodiment 59. A method of treating cancer in a human subject in need thereof comprising administering an anti-CD39 antibody comprising a VH comprising the amino acid sequence of SEQ ID NO: 30012 and a VL comprising the amino acid sequence of SEQ ID NO: 30018, wherein the antibody is administered at a dose of 700 mg intravenously every 2 weeks.

[0378] Embodiment 60. A method of treating cancer in a human subject in need thereof comprising administering an anti-CD39 antibody comprising a VH comprising the amino acid sequence of SEQ ID NO: 30012 and a VL comprising the amino acid sequence of SEQ ID NO: 30018, wherein the antibody is administered at a dose of 1400 mg intravenously every 2 weeks.

[0379] Embodiment 61. A method of treating cancer in a human subject in need thereof comprising administering an anti-CD39 antibody comprising a VH comprising the amino acid sequence of SEQ ID NO: 30012 and a VL comprising the amino acid sequence of SEQ ID NO: 30018, wherein the antibody is administered at a dose of 2000 mg intravenously every 2 weeks.

### III. EXAMPLES

### Example 1. Dose Escalation, Safety, and Tumor Biopsy Expansion Study in Patients with Advanced Solid Tumors

[0380] Patients with advanced solid tumors refractory to standard therapy were enrolled in a phase 1 study of clone 22 administered intravenously every 2 weeks (NCT04336098) to establish its preliminary safety as monotherapy and identify a dose and schedule suitable for monotherapy expansion and combination therapy cohorts. Clinical outcomes based on Response Evaluation Criteria in Solid Tumors, and pharmacokinetic (PK) and pharmacodynamic (PD) analyses were evaluated.

### Study Design:

[0381] The study was designed as a phase 1 open-label, first-in-human, monotherapy and combination therapy dose escalation, safety, and tumor biopsy expansion study in patients with advanced solid tumors. The study design includes a monotherapy dose escalation portion, a monotherapy tumor biopsy expansion portion, and a combination therapy dose escalation portion. See FIG. 1.

[0382] The monotherapy dose escalation portion of the study was designed to evaluate the safety, tolerability, pharmacokinetics (PK), pharmacodynamics, and preliminary efficacy of clone 22 as monotherapy in patients with advanced solid tumors. Patients remain on study drug until disease progression, unacceptable toxicity, or the completion of approximately 24 months of study therapy.

[0383] The doses for the monotherapy dose escalation portion of the study are shown in Table 1. The starting dose was 20 mg given intravenously (IV) once every 2 weeks. Under the study design, subsequent clone 22 dose levels may be modified, and additional dose levels and/or schedules may be investigated, based on the recommendation of the Safety Review Committee (SRC) after review of available data.

TABLE 1
Dose Levels

| Dose Level | Clone 22 Dose | | Number of Patients |
|---|---|---|---|
| 1 (starting dose) | 20 | mg | N = 1-6 |
| 2 | 70 | mg | N = 1-6 |
| 3 | 200 | mg | N = 3-6 |
| 4 | 700 | mg | N = 3-6 |
| 5 | 1400 | mg | N = 3-6 |
| 6 | 2000 | mg | N = 3-6 |

Note:
Escalation of dose levels may continue after completion of Dose Level 6 at the recommendation of the Safety Review Committee.

[0384] The monotherapy tumor biopsy expansion portion of the study was designed to further evaluate the safety and intratumoral pharmacodynamics of clone 22 monotherapy. Under the design, once a dose level has cleared and enrollment in the next dose level has begun, patients with an advanced solid tumor that is accessible for pretreatment and on-treatment biopsy may be enrolled.

[0385] The combination therapy dose escalation portion of the study was designed to evaluate the safety, tolerability, PK, and preliminary efficacy of clone 22 in combination with gemcitabine+albumin-bound paclitaxel in patients with locally advanced or metastatic solid tumors.

[0386] Under the design, combination therapy cohorts receive a clone 22 monotherapy dose level that is no higher than the most-recently cleared dose level for clone 22 monotherapy. Gemcitabine+albumin-bound paclitaxel are administered at a dose of albumin-bound paclitaxel 125 mg/m² IV over 30 to 40 minutes followed by gemcitabine 1000 mg/m2 IV on Days 1, 8, and 15 of a 28-day cycle. When scheduled on the same day, gemcitabine and albumin-bound paclitaxel is given after clone 22 has been administered and a 1-hour observation period has elapsed.

[0387] The primary study endpoint is dose limiting toxicities (DLTs), including e.g., hematologic toxicities (e.g., decreased neutrophil count, febrile neutropenia, decreased platelet count, and anemia), and nonhematologic toxicities (e.g., nausea, vomiting, diarrhea, fatigue, and immune mediated reactions). Secondary endpoints include adverse event (AEs), antidrug antibodies, electrocardiograms, safety laboratory values, serum concentrations of clone 22, levels of clone 22 target occupancy, objective response rate (ORR), duration of response, disease control rate, progression-free survival (PFS), landmark PFS rate, and levels of intratumoral CD39 enzymatic activity (in patients receiving pretreatment and on-treatment tumor biopsies).

### Interim Monotherapy Results:

[0388] As shown in Table 2, twenty-seven (27) patients have been enrolled in the monotherapy arm of the study, and two patients underwent intra-patient dose escalation. The mean age of the patients was 65 years; 10 were male and 17 female; ECOG PS was 0/1 (41%/59%). The median time since initial diagnosis was 38 months and all but two patients were treated with at least one prior systemic therapy; 8 patients were anti-PD-(L)1 experienced.

TABLE 2
Monotherapy Patient Demographics

| Total patients, n | 27 | |
|---|---|---|
| Median age, years (range) | 65 | (20, 80) |
| Sex, n (%) | | |
| Male | 10 | (37%) |
| Female | 17 | (63%) |
| ECOG PS at baseline, n (%) | | |
| 0 | 11 | (41%) |
| 1 | 16 | (59%) |
| Median time since initial diagnosis, months (range) | 38 | (7, 351) |
| Number of prior systemic therapies, n (%) | | |
| 0 | 2 | (7%) |
| 1 | 3 | (11%) |
| 2 | 4 | (15%) |
| 3 | 4 | (15%) |
| ≥4 | 14 | (52%) |
| Prior aPD-1/aPD-L1, n (%) | | |
| Yes | 8 | (30%) |
| No | 19 | (70%) |

[0389] As shown in Table 3 and Table 4, clinical outcomes based on Response Evaluation Criteria in Solid Tumors (RECIST v1.1), and pharmacokinetic (PK) and pharmacodynamic (PD) analyses were evaluated. The most common treatment emergent adverse events (“TEAE”), defined as an adverse event that emerges or worsens in the period from the first dose of clone 22 to 30 days after the last dose, across dosing cohorts were low grade fatigue (n=0, 37%), constipation (n=5, 18%) and nausea (n=5, 18%). There were no grade 3 or greater related adverse events, serious adverse events or treatment discontinuations attributed to clone 22. Clone 22 was well-tolerated and no dose-limiting toxicities were observed. Mean time on study was 8 weeks. One patient with non-small cell lung cancer who had previously progressed on chemotherapy and anti-PD-1 therapy remained on study with stable disease for 9 months prior to disease progression.

TABLE 3
Monotherapy Patient Treatment-Emergent
Adverse Event (TEAE) Summary

| Total patients, n | 27 | |
|---|---|---|
| Treatment-emergent adverse event* (TEAE), n (%) | 23 | (85%) |
| Treatment-related AE, n (%) | 14 | (52%) |
| Grade ≥3 TEAE, n (%) | 7 | (26%) |
| Grade ≥3 treatment-related AE, n (%) | 0 | (0%) |
| Serious Treatment- Emergent Adverse Event (TESAE), n | 6 | (22%) |
| (%) | | |
| Treatment-related SAE, n (%) | 0 | (0%) |
| TEAE leading to discontinuation, n (%) | 0 | (0%) |

TABLE 4
Monotherapy Patient Treatment-Emergent Adverse
Events (TEAEs) by Preferred Term

| TEAEs Occurring | | | | |
|---|---|---|---|---|
| in ≥10% of Patients | Grade | Grade | Grade | All |
| by Preferred Term, n (%) | 1 | 2 | 3 | Grades |
| Fatigue | 6 (22%) | 4 (15%) | 0 (0%) | 10 (37%) |
| Constipation | 3 (11%) | 2 (7%) | 0 (0%) | 5 (18%) |
| Nausea | 3 (11%) | 1 (4%) | 1 (4%) | 5 (18%) |
| Vomiting | 2 (7%) | 0 (0%) | 1 (4%) | 3 (11%) |
| Anemia | 0 (0%) | 0 (0%) | 3 (11%) | 3 (11%) |
| Dehydration | 1 (4%) | 2 (7%) | 0 (0%) | 3 (11%) |
| Headache | 2 (7%) | 1 (4%) | 0 (0%) | 3 (11%) |
| Pruritus | 2 (7%) | 1 (4%) | 0 (0%) | 3 (11%) |

[0390] FIG. 2 illustrates individual patients' time and dosing levels on the study. The median time on the study was 8 weeks with a range of 1 to 43 weeks, and 37% of patients had stable disease for longer than 8 weeks. Of the nineteen (19) patients with an evaluable response as of the database snapshot date, 7 patients (35%) had stable disease and 12 patients (60%) had experienced disease progression. FIG. 3 illustrates the best percentage change in target lesions from baseline for the nineteen (19) patients with an evaluable response.

[0391] As shown in FIG. 4 and FIG. 5, pharmacokinetics (PK) is linear and correlated strongly with pharmacodynamic (PD) measures of target occupancy. The estimated half-life of clone 22 was 5-7 days. Target occupancy on peripheral blood monocytes (PBMCs) increased in a dose-dependent manner. Maximal target occupancy was observed within 6 hours at doses of 70 mg and above. Target occupancy was maintained near saturation throughout the dosing interval at 200 mg and above.

### Interim Gemcitabine/Albumin-Bound Paclitaxel Combination Results:

[0392] Five (5) patients were dosed with clone 22 (200 mg intravenously once every two weeks) in combination with gemcitabine (1000 mg/m² administered as an IV infusion on Days 1, 8, and 15 of a 28-day cycle) and albumin-bound paclitaxel (125 mg/m² administered as an IV infusion over 30 to 40 minutes prior to gemcitabine on days 1, 8, and 15 of a 28-day cycle). Four (4) patients had with follow-up beyond the initial treatment cycle as of the database snapshot date.

[0393] Patients treated in the combination arm experienced adverse events as expected, with reported bone marrow suppression and diarrhea.

[0394] As shown in FIG. 6, a 60-year old male patient with pancreatic cancer with extensive liver metastases whose disease had previously progressed while on FOLFIRINOX chemotherapy regimen had an unconfirmed partial response subsequent to treatment in this combination cohort (clone 22, 200 mg administered as an intravenous injection once every two weeks; gemcitabine, 1000 mg/m² administered as an intravenous [IV] infusion on Days 1, 8, and 15 of a 28-day cycle and albumin-bound paclitaxel, 125 mg/m² administered as an IV infusion over 30 to 40 minutes prior to gemcitabine on days 1, 8, and 15 of a 28-day cycle. The patient experienced approximately 50% tumor shrinkage after two (2) cycles of therapy as reported at the first response evaluation (week 8).

### Updated Interim Monotherapy Results:

[0395] Thirty seven (37) patients have been enrolled in the monotherapy arm of the study. Median time on study was 10 weeks. The most common TEAEs in monotherapy were fatigue (35%), nausea (22%), and constipation (19%). No dose-limiting toxicities have been observed, and the monotherapy recommended phase 2 dose was determined to be 1400 mg every 2 weeks (Q2W). PK are linear and correlate strongly with PD measures of target occupancy.

### Additional Updated Interim Monotherapy Results:

[0396] Thirty nine (39) patients have been enrolled in the monotherapy arm of the study. Table 5. Clone 22 monotherapy was well-tolerated at all dose levels tested in patients with advanced solid tumors and had a favorable safety profile. As shown in FIG. 7, thirty nine (39) individuals have been enrolled in the monotherapy arm of the study, and the median time on study was 11 weeks. As shown in FIGS. 8A-8B 10 of 32 evaluable patients (31%) had disease stabilization at eight weeks, with four (12%) persisting beyond 16 weeks, with 1 patient with prolonged disease stabilization beyond 24 weeks with NSCLC whose disease previously progressed on chemotherapy and PD-1 blockade.

TABLE 5
Clone 22 Monotherapy (n = 39)

| | | |
|---|---|---|
| Median age, years (range) | 65 | (20, 80) |
| Sex, n (%) | | |
| Male | 16 | (41%) |
| Female | 23 | (59%) |
| ECOG PS at baseline, n (%) | | |
| 0 | 17 | (45%) |
| 1 | 21 | (55%) |
| Median time since initial diagnosis, months (range) | 42 | (7, 351) |
| Number of prior systemic therapies, n (%) | | |
| 0 | 1 | (2%) |
| 1-3 | 19 | (49%) |
| 4-5 | 9 | (23%) |
| ≥5 | 10 | (26%) |
| Prior aPD-1/aPD-L1, n (%) | | |
| Yes | 14 | (36%) |
| No | 25 | (64%) |

### Updated Interim Gemcitabine/Albumin-Bound Paclitaxel Combination Results:

[0397] Nine (9) patients were dosed with clone 22 in combination with gemcitabine (1000 mg/m² administered as an IV infusion on Days 1, 8, and 15 of a 28-day cycle) and albumin-bound paclitaxel (125 mg/m² administered as an IV infusion over 30 to 40 minutes prior to gemcitabine on days 1, 8, and 15 of a 28-day cycle). The most common TEAEs were fatigue (56%), anemia, nausea, and decreased neutrophil and platelet counts (44%, each). No dose-limiting toxicities have been observed. PK are linear and correlate strongly with PD measures of target occupancy.

[0398] The previously unconfirmed partial response in the 60-year old male patient with pancreatic cancer with extensive liver metastases whose disease had previously progressed while on FOLFIRINOX chemotherapy regimen was confirmed.

[0399] Preliminary data demonstrate that clone 22 is well-tolerated at doses that sustain full target occupancy throughout the dosing interval supporting the initiation of expansion cohorts.

### Updated Interim Gemcitabine/Albumin-Bound Paclitaxel Combination Results:

[0400] As shown in FIG. 9, ten (10) patients have been enrolled in the clone 22/gemcitabine/albumin-bound paclitaxel triple combination dose escalation study. To date, there has been one confirmed partial response in a patient with pancreateic cancer whose disease progressed on prior chemotherapy (FIG. 9, see star).

[0401] There are ongoing expansions enrolling in naïve gastric cancer and in PD-1 relapsed/refractory gastric and NSCLC patients.

[0402] Although the foregoing invention has been described in some detail by way of illustration and example for purposes of clarity of understanding, the descriptions and examples should not be construed as limiting the scope of the disclosure. The disclosures of all patent and scientific literature cited herein are expressly incorporated in their entirety by reference.

### IV. Table of Sequences

| SEQ | | | |
|---|---|---|---|
| ID | Clone | | |
| NO | No | Description | Sequence |
| 30001 | 22 | VH CDR1 | GTFSSEGIS |
| 30002 | 22 | VH CDR2 | SILPIFGTANYAQKFQG |
| 30003 | 22 | VH CDR3 | AREAGYYRYRYFDL |
| 30004 | 22 | VL CDR1 | RASQSVSSNLA |
| 30005 | 22 | VL CDR2 | GASTRAT |
| 30006 | 22 | VL CDR3 | QQHALWPLT |
| 30007 | 22 | VH FR1 | QVQLVQSGAEVKKPGSSVKVSCKASG |
| 30008 | 22 | VH FR2 | WVRQAPGQGLEWMG |
| 30009 | 22 | VH FR3 | RVTITADESTSTAYMELSSLRSEDTAVYYC |
| 30010 | 22 | VH FR4 | WGRGTLVTVSS |
| 30011 | 22 | VH DNA | CAAGTGCAGTTGGTGCAGTCCGGAGCCGAAGTCAAGAAGCCC |
| | | | GGGTCGAGCGTGAAAGTGTCCTGCAAGGCTTCTGGTGGAACCT |
| | | | TCTCAAGCGAAGGGATCAGCTGGGTCAGACAGGCGCCGGGCC |
| | | | AGGGTCTGGAGTGGATGGGTTCCATTCTCCCGATCTTCGGAAC |
| | | | CGCCAATTACGCCCAGAAGTTCCAGGGTCGCGTGACCATCACC |
| | | | GCCGACGAAAGCACCTCGACGGCCTATATGGAATTGTCGTCCC |
| | | | TGCGGTCGGAAGATACAGCGGTGTACTACTGTGCGCGGGAAGC |
| | | | CGGGTACTACCGCTACCGCTACTTCGATCTGTGGGGAAGGGGA |
| | | | ACTCTCGTGACTGTGTCGAGCG |
| 30012 | 22 | VH Protein | QVQLVQSGAEVKKPGSSVKVSCKASGGTFSSEGISWVRQAPGQG |
| | | | LEWMGSILPIFGTANYAQKFQGRVTITADESTSTAYMELSSLRSED |
| | | | TAVYYCAREAGYYRYRYFDLWGRGTLVTVSS |
| 30013 | 22 | VL FR1 | EIVMTQSPATLSVSPGERATLSC |
| 30014 | 22 | VL FR2 | WYQQKPGQAPRLLIY |
| 30015 | 22 | VL FR3 | GIPARFSGSGSGTEFTLTISSLQSEDFAVYYC |
| 30016 | 22 | VL FR4 | FGGGTKVEIK |
| 30017 | 22 | VL DNA | GAAATAGTGATGACGCAGTCTCCAGCCACCCTGTCTGTGTCTC |
| | | | CAGGGGAAAGAGCCACCCTCTCCTGCAGGGCCAGTCAGAGTGT |
| | | | TAGCAGCAACTTAGCCTGGTACCAGCAGAAACCTGGCCAGGCT |
| | | | CCCAGGCTCCTCATCTATGGTGCATCCACCAGGGCCACTGGTA |
| | | | TCCCAGCCAGGTTCAGTGGCAGTGGGTCTGGGACAGAGTTCAC |
| | | | TCTCACCATCAGCAGCCTGCAGTCTGAAGATTTTGCAGTTTATT |
| | | | ACTGTCAGCAGCACGCCCTCTGGCCTCTCACTTTTGGCGGAGG |
| | | | GACCAAGGTTGAGATCAAA |
| 30018 | 22 | VL Protein | EIVMTQSPATLSVSPGERATLSCRASQSVSSNLAWYQQKPGQAPR |
| | | | LLIYGASTRATGIPARFSGSGSGTEFTLTISSLQSEDFAVYYCQQHA |
| | | | LWPLTFGGGTKVEIK |
| 30019 | 22 | Heavy | QVQLVQSGAEVKKPGSSVKVSCKASGGTFSSEGISWVRQAPGQG |
| | | Chain | LEWMGSILPIFGTANYAQKFQGRVTITADESTSTAYMELSSLRSED |
| | | Protein | TAVYYCAREAGYYRYRYFDLWGRGTLVTVSSASTKGPSVFPLAP |
| | | | CSRSTSESTAALGCLVKDYFPEPVTVSWNSGALTSGVHTFPAVLQ |
| | | | SSGLYSLSSVVTVPSSSLGTKTYTCNVDHKPSNTKVDKRVESKYG |
| | | | PPCPPCPAPEFLGGPSVFLFPPKPKDTLMISRTPEVTCVVVDVSQE |
| | | | DPEVQFNWYVDGVEVHNAKTKPREEQFNSTYRVVSVLTVLHQD |
| | | | WLNGKEYKCKVSNKGLPSSIEKTISKAKGQPREPQVYTLPPSQEE |
| | | | MTKNQVSLTCLVKGFYPSDIAVEWESNGQPENNYKTTPPVLDSD |
| | | | GSFFLYSRLTVDKSRWQEGNVFSCSVMHEALHNHYTQKSLSLSL |
| | | | G |
| 30020 | 22 | Heavy | CAAGTGCAGTTGGTGCAGTCCGGAGCCGAAGTCAAGAAGCCC |
| | | Chain DNA | GGGTCGAGCGTGAAAGTGTCCTGCAAGGCTTCTGGTGGAACCT |
| | | | TCTCAAGCGAAGGGATCAGCTGGGTCAGACAGGCGCCGGGCC |
| | | | AGGGTCTGGAGTGGATGGGTTCCATTCTCCCGATCTTCGGAAC |
| | | | CGCCAATTACGCCCAGAAGTTCCAGGGTCGCGTGACCATCACC |
| | | | GCCGACGAAAGCACCTCGACGGCCTATATGGAATTGTCGTCCC |
| | | | TGCGGTCGGAAGATACAGCGGTGTACTACTGTGCGCGGGAAGC |
| | | | CGGGTACTACCGCTACCGCTACTTCGATCTGTGGGGAAGGGGA |
| | | | ACTCTCGTGACTGTGTCGAGCGCCAGCACCAAGGGACCCAGCG |
| | | | TGTTCCCGCTGGCCCCTTGTTCACGATCCACTTCCGAAAGCACC |
| | | | GCTGCCCTTGGCTGCCTTGTCAAGGACTACTTCCCTGAGCCCGT |
| | | | CACTGTGTCGTGGAACAGCGGAGCTCTGACCTCCGGCGTCCAC |
| | | | ACCTTCCCGGCTGTGCTCCAGTCCTCCGGCCTGTACTCACTGTC |
| | | | CTCGGTGGTCACCGTGCCCTCCTCCTCCCTCGGTACCAAGACTT |
| | | | ATACCTGCAACGTGGACCACAAGCCCTCCAACACCAAAGTGGA |
| | | | TAAGAGAGTGGAGAGCAAATACGGACCTCCCTGCCCTCCTTGC |
| | | | CCTGCGCCTGAGTTTCTGGGCGGACCATCCGTCTTTCTGTTCCC |
| | | | ACCGAAGCCCAAGGACACCCTCATGATCTCCCGGACCCCCGAA |
| | | | GTGACCTGTGTGGTGGTGGACGTGTCACAGGAGGACCCTGAAG |
| | | | TGCAGTTTAATTGGTACGTCGACGGCGTGGAAGTGCATAACGC |
| | | | AAAGACCAAGCCGCGGGAGGAACAGTTCAACTCAACCTACCG |
| | | | CGTGGTGTCCGTGCTGACTGTGCTGCACCAGGACTGGCTGAAC |
| | | | GGAAAGGAGTATAAGTGCAAAGTCTCCAACAAGGGACTGCCG |
| | | | AGCAGCATCGAGAAAACCATTTCAAAAGCCAAGGGCCAGCCG |
| | | | AGAGAGCCCCAAGTGTACACTCTGCCGCCGAGCCAAGAGGAA |
| | | | ATGACCAAGAACCAAGTGTCCCTCACTTGCCTGGTCAAGGGCT |
| | | | TCTACCCGTCGGACATCGCCGTGGAGTGGGAAAGCAACGGCCA |
| | | | GCCGGAAAACAACTACAAGACTACCCCTCCCGTCCTCGACTCC |
| | | | GACGGGTCCTTCTTCCTCTACTCCCGGCTGACTGTGGATAAGTC |
| | | | ACGGTGGCAGGAGGGAAACGTGTTCTCGTGCTCCGTGATGCAC |
| | | | GAAGCCCTGCACAACCACTACACGCAGAAGTCCCTGTCCTTGT |
| | | | CCCTGGGG |
| 30021 | 22 | Light Chain | EIVMTQSPATLSVSPGERATLSCRASQSVSSNLAWYQQKPGQAPR |
| | | Protein | LLIYGASTRATGIPARFSGSGSGTEFTLTISSLQSEDFAVYYCQQHA |
| | | | LWPLTFGGGTKVEIKRTVAAPSVFIFPPSDEQLKSGTASVVCLLNN |
| | | | FYPREAKVQWKVDNALQSGNSQESVTEQDSKDSTYSLSSTLTLSK |
| | | | ADYEKHKVYACEVTHQGLSSPVTKSFNRGEC |
| 30022 | 22 | Light Chain | GAAATAGTGATGACGCAGTCTCCAGCCACCCTGTCTGTGTCTC |
| | | DNA | CAGGGGAAAGAGCCACCCTCTCCTGCAGGGCCAGTCAGAGTGT |
| | | | TAGCAGCAACTTAGCCTGGTACCAGCAGAAACCTGGCCAGGCT |
| | | | CCCAGGCTCCTCATCTATGGTGCATCCACCAGGGCCACTGGTA |
| | | | TCCCAGCCAGGTTCAGTGGCAGTGGGTCTGGGACAGAGTTCAC |
| | | | TCTCACCATCAGCAGCCTGCAGTCTGAAGATTTTGCAGTTTATT |
| | | | ACTGTCAGCAGCACGCCCTCTGGCCTCTCACTTTTGGCGGAGG |
| | | | GACCAAGGTTGAGATCAAACGTACGGTGGCCGCTCCCTCCGTG |
| | | | TTCATCTTCCCACCCTCCGACGAGCAGCTGAAGTCCGGCACCG |
| | | | CCTCCGTCGTGTGCCTGCTGAACAACTTCTACCCTCGCGAGGCC |
| | | | AAAGTGCAGTGGAAAGTGGACAACGCCCTGCAGTCCGGCAAC |
| | | | TCCCAGGAATCCGTCACCGAGCAGGACTCCAAGGACAGCACCT |
| | | | ACTCCCTGTCCTCCACCCTGACCCTGTCCAAGGCCGACTACGA |
| | | | GAAGCACAAAGTGTACGCCTGCGAAGTGACCCACCAGGGCCT |
| | | | GTCCAGCCCCGTGACCAAGTCCTTCAACCGGGGCGAGTGC |
| 30023 | 22 | Heavy | GATATCGCCACCATGGCCTCTCCAGCTCAGCTGCTGTTTC |
| | | (5’ and 3’ | TGCTGCTGCTGTGGCTGCCTGACGGCGTGCACGCACAAGTGCA |
| | | EcoRV | GTTGGTGCAGTCCGGAGCCGAAGTCAAGAAGCCCGGGTCGAG |
| | | restriction | CGTGAAAGTGTCCTGCAAGGCTTCTGGTGGAACCTTCTCAAGC |
| | | sites (bold), | GAAGGGATCAGCTGGGTCAGACAGGCGCCGGGCCAGGGTCTG |
| | | Kozak | GAGTGGATGGGTTCCATTCTCCCGATCTTCGGAACCGCCAATT |
| | | sequence | ACGCCCAGAAGTTCCAGGGTCGCGTGACCATCACCGCCGACGA |
| | | (italics); | AAGCACCTCGACGGCCTATATGGAATTGTCGTCCCTGCGGTCG |
| | | signal | GAAGATACAGCGGTGTACTACTGTGCGCGGGAAGCCGGGTACT |
| | | sequence | ACCGCTACCGCTACTTCGATCTGTGGGGAAGGGGAACTCTCGT |
| | | (underline)) | GACTGTGTCGAGCGCCAGCACCAAGGGACCCAGCGTGTTCCCG |
| | | Chain DNA | CTGGCCCCTTGTTCACGATCCACTTCCGAAAGCACCGCTGCCCT |
| | | | TGGCTGCCTTGTCAAGGACTACTTCCCTGAGCCCGTCACTGTGT |
| | | | CGTGGAACAGCGGAGCTCTGACCTCCGGCGTCCACACCTTCCC |
| | | | GGCTGTGCTCCAGTCCTCCGGCCTGTACTCACTGTCCTCGGTGG |
| | | | TCACCGTGCCCTCCTCCTCCCTCGGTACCAAGACTTATACCTGC |
| | | | AACGTGGACCACAAGCCCTCCAACACCAAAGTGGATAAGAGA |
| | | | GTGGAGAGCAAATACGGACCTCCCTGCCCTCCTTGCCCTGCGC |
| | | | CTGAGTTTCTGGGCGGACCATCCGTCTTTCTGTTCCCACCGAAG |
| | | | CCCAAGGACACCCTCATGATCTCCCGGACCCCCGAAGTGACCT |
| | | | GTGTGGTGGTGGACGTGTCACAGGAGGACCCTGAAGTGCAGTT |
| | | | TAATTGGTACGTCGACGGCGTGGAAGTGCATAACGCAAAGACC |
| | | | AAGCCGCGGGAGGAACAGTTCAACTCAACCTACCGCGTGGTGT |
| | | | CCGTGCTGACTGTGCTGCACCAGGACTGGCTGAACGGAAAGGA |
| | | | GTATAAGTGCAAAGTCTCCAACAAGGGACTGCCGAGCAGCATC |
| | | | GAGAAAACCATTTCAAAAGCCAAGGGCCAGCCGAGAGAGCCC |
| | | | CAAGTGTACACTCTGCCGCCGAGCCAAGAGGAAATGACCAAG |
| | | | AACCAAGTGTCCCTCACTTGCCTGGTCAAGGGCTTCTACCCGTC |
| | | | GGACATCGCCGTGGAGTGGGAAAGCAACGGCCAGCCGGAAAA |
| | | | CAACTACAAGACTACCCCTCCCGTCCTCGACTCCGACGGGTCC |
| | | | TTCTTCCTCTACTCCCGGCTGACTGTGGATAAGTCACGGTGGCA |
| | | | GGAGGGAAACGTGTTCTCGTGCTCCGTGATGCACGAAGCCCTG |
| | | | CACAACCACTACACGCAGAAGTCCCTGTCCTTGTCCCTGGGGA |
| | | | AGTAATGAGATATC |

The application's sequence listing, which the Patent Office published only in electronic form, follows.

SEQUENCE LISTING (30023 sequences)

SEQ ID NO: 1-30000 - skipped (30000 entries)

SEQ ID NO: 30001 - protein, 9 aa, Artificial Sequence
  Synthetic
GTFSSEGIS

SEQ ID NO: 30002 - protein, 17 aa, Artificial Sequence
  Synthetic
SILPIFGTANYAQKFQG

SEQ ID NO: 30003 - protein, 14 aa, Artificial Sequence
  Synthetic
AREAGYYRYRYFDL

SEQ ID NO: 30004 - protein, 11 aa, Artificial Sequence
  Synthetic
RASQSVSSNLA

SEQ ID NO: 30005 - protein, 7 aa, Artificial Sequence
  Synthetic
GASTRAT

SEQ ID NO: 30006 - protein, 9 aa, Artificial Sequence
  Synthetic
QQHALWPLT

SEQ ID NO: 30007 - protein, 26 aa, Artificial Sequence
  Synthetic
QVQLVQSGAEVKKPGSSVKVSCKASG

SEQ ID NO: 30008 - protein, 14 aa, Artificial Sequence
  Synthetic
WVRQAPGQGLEWMG

SEQ ID NO: 30009 - protein, 30 aa, Artificial Sequence
  Synthetic
RVTITADESTSTAYMELSSLRSEDTAVYYC

SEQ ID NO: 30010 - protein, 11 aa, Artificial Sequence
  Synthetic
WGRGTLVTVSS

SEQ ID NO: 30011 - DNA, 364 bp, Artificial Sequence
  Synthetic
caagtgcagttggtgcagtccggagccgaagtcaagaagcccgggtcgagcgtgaaagtgtcctgcaaggcttctggtggaaccttctcaagcgaagggatcagctgggtcagacaggcgccgggccagggtctggagtggatgggttccattctcccgatcttcggaaccgccaattacgcccagaagttccagggtcgcgtgaccatcaccgccgacgaaagcacctcgacggcctatatggaattgtcgtccctgcggtcggaagatacagcggtgtactactgtgcgcgggaagccgggtactaccgctaccgctacttcgatctgtggggaaggggaactctcgtgactgtgtcgagcg

SEQ ID NO: 30012 - protein, 121 aa, Artificial Sequence
  Synthetic
QVQLVQSGAEVKKPGSSVKVSCKASGGTFSSEGISWVRQAPGQGLEWMGSILPIFGTANYAQKFQGRVTITADESTSTAYMELSSLRSEDTAVYYCAREAGYYRYRYFDLWGRGTLVTVSS

SEQ ID NO: 30013 - protein, 23 aa, Artificial Sequence
  Synthetic
EIVMTQSPATLSVSPGERATLSC

SEQ ID NO: 30014 - protein, 15 aa, Artificial Sequence
  Synthetic
WYQQKPGQAPRLLIY

SEQ ID NO: 30015 - protein, 32 aa, Artificial Sequence
  Synthetic
GIPARFSGSGSGTEFTLTISSLQSEDFAVYYC

SEQ ID NO: 30016 - protein, 10 aa, Artificial Sequence
  Synthetic
FGGGTKVEIK

SEQ ID NO: 30017 - DNA, 321 bp, Artificial Sequence
  Synthetic
gaaatagtgatgacgcagtctccagccaccctgtctgtgtctccaggggaaagagccaccctctcctgcagggccagtcagagtgttagcagcaacttagcctggtaccagcagaaacctggccaggctcccaggctcctcatctatggtgcatccaccagggccactggtatcccagccaggttcagtggcagtgggtctgggacagagttcactctcaccatcagcagcctgcagtctgaagattttgcagtttattactgtcagcagcacgccctctggcctctcacttttggcggagggaccaaggttgagatcaaa

SEQ ID NO: 30018 - protein, 107 aa, Artificial Sequence
  Synthetic
EIVMTQSPATLSVSPGERATLSCRASQSVSSNLAWYQQKPGQAPRLLIYGASTRATGIPARFSGSGSGTEFTLTISSLQSEDFAVYYCQQHALWPLTFGGGTKVEIK

SEQ ID NO: 30019 - protein, 447 aa, Artificial Sequence
  Synthetic
QVQLVQSGAEVKKPGSSVKVSCKASGGTFSSEGISWVRQAPGQGLEWMGSILPIFGTANYAQKFQGRVTITADESTSTAYMELSSLRSEDTAVYYCAREAGYYRYRYFDLWGRGTLVTVSSASTKGPSVFPLAPCSRSTSESTAALGCLVKDYFPEPVTVSWNSGALTSGVHTFPAVLQSSGLYSLSSVVTVPSSSLGTKTYTCNVDHKPSNTKVDKRVESKYGPPCPPCPAPEFLGGPSVFLFPPKPKDTLMISRTPEVTCVVVDVSQEDPEVQFNWYVDGVEVHNAKTKPREEQFNSTYRVVSVLTVLHQDWLNGKEYKCKVSNKGLPSSIEKTISKAKGQPREPQVYTLPPSQEEMTKNQVSLTCLVKGFYPSDIAVEWESNGQPENNYKTTPPVLDSDGSFFLYSRLTVDKSRWQEGNVFSCSVMHEALHNHYTQKSLSLSLG

SEQ ID NO: 30020 - DNA, 1341 bp, Artificial Sequence
  Synthetic
caagtgcagttggtgcagtccggagccgaagtcaagaagcccgggtcgagcgtgaaagtgtcctgcaaggcttctggtggaaccttctcaagcgaagggatcagctgggtcagacaggcgccgggccagggtctggagtggatgggttccattctcccgatcttcggaaccgccaattacgcccagaagttccagggtcgcgtgaccatcaccgccgacgaaagcacctcgacggcctatatggaattgtcgtccctgcggtcggaagatacagcggtgtactactgtgcgcgggaagccgggtactaccgctaccgctacttcgatctgtggggaaggggaactctcgtgactgtgtcgagcgccagcaccaagggacccagcgtgttcccgctggccccttgttcacgatccacttccgaaagcaccgctgcccttggctgccttgtcaaggactacttccctgagcccgtcactgtgtcgtggaacagcggagctctgacctccggcgtccacaccttcccggctgtgctccagtcctccggcctgtactcactgtcctcggtggtcaccgtgccctcctcctccctcggtaccaagacttatacctgcaacgtggaccacaagccctccaacaccaaagtggataagagagtggagagcaaatacggacctccctgccctccttgccctgcgcctgagtttctgggcggaccatccgtctttctgttcccaccgaagcccaaggacaccctcatgatctcccggacccccgaagtgacctgtgtggtggtggacgtgtcacaggaggaccctgaagtgcagtttaattggtacgtcgacggcgtggaagtgcataacgcaaagaccaagccgcgggaggaacagttcaactcaacctaccgcgtggtgtccgtgctgactgtgctgcaccaggactggctgaacggaaaggagtataagtgcaaagtctccaacaagggactgccgagcagcatcgagaaaaccatttcaaaagccaagggccagccgagagagccccaagtgtacactctgccgccgagccaagaggaaatgaccaagaaccaagtgtccctcacttgcctggtcaagggcttctacccgtcggacatcgccgtggagtgggaaagcaacggccagccggaaaacaactacaagactacccctcccgtcctcgactccgacgggtccttcttcctctactcccggctgactgtggataagtcacggtggcaggagggaaacgtgttctcgtgctccgtgatgcacgaagccctgcacaaccactacacgcagaagtccctgtccttgtccctgggg

SEQ ID NO: 30021 - protein, 214 aa, Artificial Sequence
  Synthetic
EIVMTQSPATLSVSPGERATLSCRASQSVSSNLAWYQQKPGQAPRLLIYGASTRATGIPARFSGSGSGTEFTLTISSLQSEDFAVYYCQQHALWPLTFGGGTKVEIKRTVAAPSVFIFPPSDEQLKSGTASVVCLLNNFYPREAKVQWKVDNALQSGNSQESVTEQDSKDSTYSLSSTLTLSKADYEKHKVYACEVTHQGLSSPVTKSFNRGEC

SEQ ID NO: 30022 - DNA, 642 bp, Artificial Sequence
  Synthetic
gaaatagtgatgacgcagtctccagccaccctgtctgtgtctccaggggaaagagccaccctctcctgcagggccagtcagagtgttagcagcaacttagcctggtaccagcagaaacctggccaggctcccaggctcctcatctatggtgcatccaccagggccactggtatcccagccaggttcagtggcagtgggtctgggacagagttcactctcaccatcagcagcctgcagtctgaagattttgcagtttattactgtcagcagcacgccctctggcctctcacttttggcggagggaccaaggttgagatcaaacgtacggtggccgctccctccgtgttcatcttcccaccctccgacgagcagctgaagtccggcaccgcctccgtcgtgtgcctgctgaacaacttctaccctcgcgaggccaaagtgcagtggaaagtggacaacgccctgcagtccggcaactcccaggaatccgtcaccgagcaggactccaaggacagcacctactccctgtcctccaccctgaccctgtccaaggccgactacgagaagcacaaagtgtacgcctgcgaagtgacccaccagggcctgtccagccccgtgaccaagtccttcaaccggggcgagtgc

SEQ ID NO: 30023 - DNA, 1431 bp, Artificial Sequence
  Synthetic
gatatcgccaccatggcctctccagctcagctgctgtttctgctgctgctgtggctgcctgacggcgtgcacgcacaagtgcagttggtgcagtccggagccgaagtcaagaagcccgggtcgagcgtgaaagtgtcctgcaaggcttctggtggaaccttctcaagcgaagggatcagctgggtcagacaggcgccgggccagggtctggagtggatgggttccattctcccgatcttcggaaccgccaattacgcccagaagttccagggtcgcgtgaccatcaccgccgacgaaagcacctcgacggcctatatggaattgtcgtccctgcggtcggaagatacagcggtgtactactgtgcgcgggaagccgggtactaccgctaccgctacttcgatctgtggggaaggggaactctcgtgactgtgtcgagcgccagcaccaagggacccagcgtgttcccgctggccccttgttcacgatccacttccgaaagcaccgctgcccttggctgccttgtcaaggactacttccctgagcccgtcactgtgtcgtggaacagcggagctctgacctccggcgtccacaccttcccggctgtgctccagtcctccggcctgtactcactgtcctcggtggtcaccgtgccctcctcctccctcggtaccaagacttatacctgcaacgtggaccacaagccctccaacaccaaagtggataagagagtggagagcaaatacggacctccctgccctccttgccctgcgcctgagtttctgggcggaccatccgtctttctgttcccaccgaagcccaaggacaccctcatgatctcccggacccccgaagtgacctgtgtggtggtggacgtgtcacaggaggaccctgaagtgcagtttaattggtacgtcgacggcgtggaagtgcataacgcaaagaccaagccgcgggaggaacagttcaactcaacctaccgcgtggtgtccgtgctgactgtgctgcaccaggactggctgaacggaaaggagtataagtgcaaagtctccaacaagggactgccgagcagcatcgagaaaaccatttcaaaagccaagggccagccgagagagccccaagtgtacactctgccgccgagccaagaggaaatgaccaagaaccaagtgtccctcacttgcctggtcaagggcttctacccgtcggacatcgccgtggagtgggaaagcaacggccagccggaaaacaactacaagactacccctcccgtcctcgactccgacgggtccttcttcctctactcccggctgactgtggataagtcacggtggcaggagggaaacgtgttctcgtgctccgtgatgcacgaagccctgcacaaccactacacgcagaagtccctgtccttgtccctggggaagtaatgagatatc

1.-68. (canceled)

69. A method of treating cancer in a human subject in need thereof comprising administering a pharmaceutical composition comprising an anti-CD39 antibody or fragment thereof, wherein the antibody is administered at a dose of 1400 mg or 2000 mg.

70. The method of claim 69, wherein the anti-CD39 antibody or fragment thereof comprises:
(a) HCDR1 comprising the amino acid sequence of SEQ ID NO: 30001;
(b) HCDR2 comprising the amino acid sequence of SEQ ID NO: 30002;
(c) HCDR3 comprising the amino acid sequence of SEQ ID NO: 30003;
(d) LCDR1 comprising the amino acid sequence of SEQ ID NO: 30004;
(e) LCDR2 comprising the amino acid sequence of SEQ ID NO: 30005; and
(f) LCDR3 comprising the amino acid sequence of SEQ ID NO: 30006.

71. The method of claim 69, wherein the antibody or fragment thereof is administered intravenously.

72. The method of claim 69, wherein the antibody or fragment thereof is administered once every 1, 2, 3, 4, 5 or 6 weeks.

73. The method of claim 69, wherein the antibody or fragment thereof comprises a heavy chain variable region (VH) and a light chain variable region (VL), wherein the VH is at least 90%, 91%, 92%, 93%, 94%, 95%, 96%, 97%, 98%, 99%, or 100% identical to the amino acid sequence of SEQ ID NO: 30012 and the VL is at least 90%, 91%, 92%, 93%, 94%, 95%, 96%, 97%, 98%, 99%, or 100% identical to the amino acid sequence of SEQ ID NO: 30018.

74. The method of claim 69, wherein the antibody or fragment thereof comprises a fully human immunoglobulin G4 (IgG4) antibody.

75. A pharmaceutical composition comprising an anti-CD39 antibody or fragment thereof and a pharmaceutically acceptable carrier, wherein the anti-CD39 antibody or fragment thereof is formulated for administration at a dose of 1400 mg or 2000 mg.

76. The pharmaceutical composition of claim 75, wherein the anti-CD39 antibody or fragment thereof comprises:
(a) six CDRs comprising:
i. HCDR1 comprising the amino acid sequence of SEQ ID NO: 30001;
ii. HCDR2 comprising the amino acid sequence of SEQ ID NO: 30002;
iii. HCDR3 comprising the amino acid sequence of SEQ ID NO: 30003;
iv. LCDR1 comprising the amino acid sequence of SEQ ID NO: 30004;
v. LCDR2 comprising the amino acid sequence of SEQ ID NO: 30005; and
vi. LCDR3 comprising the amino acid sequence of SEQ ID NO: 30006; or
(b) a VH comprising the amino acid sequence of SEQ ID NO: 30012 and a VL comprising the amino acid sequence of SEQ ID NO: 30018.

77. The method of claim 69, wherein the cancer is:
(a) newly diagnosed or non-metastatic;
(b) advanced;
(c) refractory;
(d) metastatic;
(e) a solid tumor;
(f) an advanced solid tumor;
(g) a relapsed solid tumor;
(h) a refractory solid tumor;
(i) a metastatic solid tumor;
(j) carcinoma, lymphoma, blastoma, sarcoma, or leukemia;
(k) pancreatic cancer;
(l) gastric cancer;
(m) prostate cancer;
(n) endometrial cancer;
(o) non-small cell lung cancer;
(p) colorectal cancer;
(q) ovarian cancer; and/or
(r) squamous cell cancer, small-cell lung cancer, pituitary cancer, esophageal cancer, astrocytoma, soft tissue sarcoma, non-small cell lung cancer (including squamous cell non-small cell lung cancer), adenocarcinoma of the lung, squamous carcinoma of the lung, cancer of the peritoneum, hepatocellular cancer, gastrointestinal cancer, pancreatic cancer, glioblastoma, cervical cancer, ovarian cancer, liver cancer, bladder cancer, hepatoma, breast cancer, colon cancer, colorectal cancer, endometrial or uterine carcinoma, salivary gland carcinoma, kidney cancer, renal cell carcinoma, liver cancer, prostate cancer, vulval cancer, thyroid cancer, hepatic carcinoma, brain cancer, endometrial cancer, testis cancer, cholangiocarcinoma, gallbladder carcinoma, gastric cancer, melanoma, or various types of head and neck cancer (including squamous cell carcinoma of the head and neck).

78. The method of claim 69, wherein the method or use further comprises administering a second therapy.

79. The method of claim 78, wherein the second therapy is:
(a) a chemotherapeutic agent;
(b) gemcitabine;
(c) albumin-bound paclitaxel;
(d) an antagonist of PD-1 or PD-Li; or
(e) an anti-PD-1 or anti-PD-L1 antibody.

80. The method of claim 69, wherein the method or use further comprises administering two additional therapies.

81. The method of claim 80, wherein the two additional therapies comprise:
(a) a chemotherapeutic agent and an antagonist of PD-1 or an antagonist of PD-L1;
(b) a chemotherapeutic agent and an agent targeting the adenosine axis;
(c) an antagonist of PD-1 or an antagonist of PD-L1 and an agent targeting the adenosine axis;
(d) at least one chemotherapeutic agent; or
(e) two chemotherapeutic agents.

82. The method or of claim 80, wherein one of the two additional therapies comprise:
(a) an A2AR antagonist, an A2BR antagonist, or a dual A2AR/A2B antagonist;
(b) gemcitabine; or
(c) albumin-bound paclitaxel.

83. The method of claim 80, wherein the two additional therapies comprise gemcitabine and albumin-bound paclitaxel.

84. The method of claim 78, wherein albumin-bound paclitaxel is administered at a dose of 125 mg/m² on days 1, 8, and 15 of a 28-day cycle.

85. The method of claim 78, wherein gemcitabine is administered at a dose of 1000 mg/m² on days 1, 8, and 15 of a 28-day cycle.

86. The method of claim 78, wherein albumin-bound paclitaxel or gemcitabine is administered to the subject by intravenous administration.

87. The method of claim 83, wherein the anti-CD39 antibody, albumin-bound paclitaxel, and gemcitabine are administered sequentially.

88. The method of claim 83, wherein the anti-CD39 antibody is administered before albumin-bound paclitaxel and gemcitabine are administered.

89. The method of claim 69, wherein the anti-CD39 antibody comprises a VH comprising the amino acid sequence of SEQ ID NO: 30012 and a VL comprising the amino acid sequence of SEQ ID NO: 30018, wherein the antibody is administered at a dose of 1400 mg intravenously every 2 weeks.

90. The method of claim 69, wherein the anti-CD39 antibody comprises a VH comprising the amino acid sequence of SEQ ID NO: 30012 and a VL comprising the amino acid sequence of SEQ ID NO: 30018, wherein the antibody is administered at a dose of 2000 mg intravenously every 2 weeks.

91. The method of claim 69, wherein the anti-CD39 antibody comprises a VH comprising the amino acid sequence of SEQ ID NO: 30012 and a VL comprising the amino acid sequence of SEQ ID NO: 30018, wherein the antibody is administered at a dose of 1400 mg intravenously every 2 weeks, and further administering one or two chemotherapeutic agents.

92. The method of claim 69, wherein the anti-CD39 antibody comprises a VH comprising the amino acid sequence of SEQ ID NO: 30012 and a VL comprising the amino acid sequence of SEQ ID NO: 30018, wherein the antibody is administered at a dose of 2000 mg intravenously every 2 weeks, and further administering one or two chemotherapeutic agents.

93. The method of claim 69, wherein the anti-CD39 antibody comprises a VH comprising the amino acid sequence of SEQ ID NO: 30012 and a VL comprising the amino acid sequence of SEQ ID NO: 30018, wherein the antibody is administered at a dose of 1400 mg intravenously every 2 weeks, and further administering gemcitabine and albumin-bound paclitaxel.

94. The method of claim 69, wherein the anti-CD39 antibody comprises a VH comprising the amino acid sequence of SEQ ID NO: 30012 and a VL comprising the amino acid sequence of SEQ ID NO: 30018, wherein the antibody is administered at a dose of 2000 mg intravenously every 2 weeks, and further administering gemcitabine and albumin-bound paclitaxel.
